United States Patent Application Publication US 2024/0117295 A1 - sequence listing, part 9

SEQ ID NO: 7 - DNA, 3977487 bp, Artificial Sequence (residues 1-1,988,744 of 3,977,487)
  Synthetic E.coli genome
agcttttcattctgactgcaacgggcaatatgtctctgtgtggattaaaaaaagagtgtctgatagcagcttctgaactggttacctgccgtgagtaaattaaaattttattgacttaggtcactaaatactttaaccaatataggcatagcgcacagacagataaaaattacagagtacacaacatccatgaaacgcattagcaccaccattaccaccaccatcaccattaccacaggtaacggtgcgggctgacgcgtacaggaaacacagaaaaaagcccgcacctgacagtgcgggcttttttttttcgaccaaaggtaacgaggtaacaaccatgcgagtgttgaagttcggcggtacaagtgtggcaaatgcagaacgttttctgcgtgttgccgatattctggaaagcaatgccaggcaggggcaggtggccaccgtcctctctgcccccgccaaaatcaccaaccacctggtggcgatgattgaaaaaaccattagcggccaggatgctttacccaatatcagcgatgccgaacgtatttttgccgaacttttgacgggactcgccgccgcccagccggggttcccgctggcgcaattgaaaactttcgtcgatcaggaatttgcccaaataaaacatgtcctgcatggcattagtttgttggggcagtgcccggatagcatcaacgctgcgctgatttgccgtggcgagaaaatgagcatcgccattatggccggcgtattagaagcgcgcggtcacaacgttactgttatcgatccggtcgaaaaactgctggcagtggggcattacctcgaatctaccgtcgatattgctgagtccacccgccgtattgcggcaagccgcattccggctgatcacatggtgctgatggcaggtttcaccgccggtaatgaaaaaggcgaactggtggtgcttggacgcaacggttccgactactctgctgcggtgctggctgcctgtttacgcgccgattgttgcgagatttggacggacgttgacggggtctatacctgcgacccgcgtcaggtgcccgatgcgaggttgttgaagagcatgtcctaccaggaagcgatggagctttcctacttcggcgctaaagttcttcacccccgcaccattacccccatcgcccagttccagatcccttgcctgattaaaaataccggaaatcctcaagcaccaggtacgctcattggtgccagccgtgatgaagacgaattaccggtcaagggcatttccaatctgaataacatggcaatgttcagcgtttctggtccggggatgaaagggatggtcggcatggcggcgcgcgtctttgcagcgatgagtcgcgcccgtatttccgtggtgctgattacgcaaagttcttccgaatacagcatcagtttctgcgttccacaaagcgactgtgtgcgagctgaacgggcaatgcaggaagagttctacctggaactgaaagaaggcttactggagccgctggcagtgacggaacggctggccattatcagcgtggtaggtgatggtatgcgcaccttgcgtgggatcagcgcgaaattctttgccgcactggcccgcgccaatatcaacattgtcgccattgctcagggatcttctgaacgcagtatctctgtcgtggtaaataacgatgatgcgaccactggcgtgcgcgttactcatcagatgctgttcaataccgatcaggttatcgaagtgtttgtgattggcgtcggtggcgttggcggtgcgctgctggagcaactgaagcgtcagcaaagctggctgaagaataaacatatcgacttacgtgtctgcggtgttgccaacagcaaggctctgctcaccaatgtacatggccttaatctggaaaactggcaggaagaactggcgcaagccaaagagccgtttaatctcgggcgcttaattcgcctcgtgaaagaatatcatctgctgaacccggtcattgttgactgcacttccagccaggcagtggcggatcaatatgccgacttcctgcgcgaaggtttccacgttgtcacgccgaacaaaaaggccaacaccagcagcatggattactaccatcagttgcgttatgcggcggaaaaaagccggcgtaaattcctctatgacaccaacgttggggctggattaccggttattgagaacctgcaaaatctgctcaatgcaggtgatgaattgatgaagttctccggcattctttctggtagcctttcttatatcttcggcaagttagacgaaggcatgagtttctccgaggcgaccacgctggcgcgggaaatgggttataccgaaccggacccgcgagatgatctttctggtatggatgtggcgcgtaaactattgattctcgctcgtgaaacgggacgtgaactggagctggcggatattgaaattgaacctgtgctgcccgcagagtttaacgccgagggtgatgttgccgcttttatggcgaatctgagtcaactcgacgatctctttgccgcgcgcgtggcgaaggcccgtgatgaaggaaaagttttgcgctatgttggcaatattgatgaagatggcgtctgccgcgtgaagattgccgaagtggatggtaatgatccgctgttcaaagtgaaaaatggcgaaaacgccctggccttctatagccactattatcagccgctgccgttggtactgcgcggatatggtgcgggcaatgacgttacagctgccggtgtctttgctgatctgctacgtaccctcagttggaagttaggagtctgacatggttaaagtttatgccccggcttccagtgccaatatgagcgtcgggtttgatgtgctcggggcggcggtgacacctgttgatggtgcattgctcggagatgtagtcacggttgaggcggcagagacattcagtctcaacaacctcggacgctttgccgataagctgccgagtgaaccacgggaaaatatcgtttatcagtgctgggagcgtttttgccaggaactgggtaagcaaattccagtggcgatgaccctggaaaagaatatgccgatcggtagcggcttaggctccagtgcctgtagcgtggtcgcggcgctgatggcgatgaatgaacactgcggcaagccgcttaatgacactcgtttgctggctttgatgggcgagctggaaggccgtatctccggcagcattcattacgacaacgtggcaccgtgttttctcggtggtatgcagttgatgatcgaagaaaacgacatcatcagccagcaagtgccagggtttgatgagtggctgtgggtgctggcgtatccggggattaaagtcagcacggcagaagccagggctattttaccggcgcagtatcgccgccaggattgcattgcgcacgggcgacatctggcaggcttcattcacgcctgctattcccgtcagcctgagcttgccgcgaagctgatgaaagatgttatcgctgaaccctaccgtgaacggttactgccaggcttccggcaggcgcggcaggcggtcgcggaaatcggcgcggtagcgagcggtatctccggctccggcccgaccttgttcgctctgtgtgacaagccggaaaccgcccagcgcgttgccgactggttgggtaagaactacctgcaaaatcaggaaggttttgttcatatttgccggctggatacggcgggcgcacgagtactggaaaactaaatgaaactctacaatctgaaagatcacaacgagcaggtcagctttgcgcaagccgtaacccaggggttgggcaaaaatcaggggctgttttttccgcacgacctgccggaattcagcctgactgaaattgatgagatgctgaagctggattttgtcacccgcagtgcgaagatcctcagcgcgtttattggtgatgaaatcccacaggaaatcctggaagagcgcgtgcgcgcggcgtttgccttcccggctccggtcgccaatgttgaaagcgatgtcggttgtctggaattgttccacgggccaacgctggcatttaaagatttcggcggtcgctttatggcacaaatgctgacccatattgcgggtgataagccagtgaccattctgaccgcgacctccggtgataccggagcggcagtggctcatgctttctacggtttaccgaatgtgaaagtggttatcctctatccacgaggcaaaatcagtccactgcaagaaaaactgttctgtacattgggcggcaatatcgaaactgttgccatcgacggcgatttcgatgcctgtcaggcgctggtgaagcaggcgtttgatgatgaagaactgaaagtggcgctagggttaaacagcgctaacagcattaacatcagccgtttgctggcgcagatttgctactactttgaagctgttgcgcagctgccgcaggagacgcgcaaccagctggttgtcagcgtgccaagcggaaacttcggcgatttgacggcgggtctgctggcgaagagtctcggtctgccggtgaaacgttttattgctgcgaccaacgtgaacgataccgtgccacgtttcctgcacgacggtcagtggagtcccaaagcgactcaggcgacgttatccaacgcgatggacgtgagtcagccgaacaactggccgcgtgtggaagagttgttccgccgcaaaatctggcaactgaaagagctgggttatgcagccgtggatgatgaaaccacgcaacagacaatgcgtgagctaaaagaactgggctacactagcgagccgcacgctgccgtagcttatcgtgcgctgcgtgatcagttgaatccaggcgaatatggcttgttcctcggcaccgcgcatccggcgaaatttaaagagagcgtggaagcgattctcggtgaaacgttggatctgccaaaagagctggcagaacgtgctgatttacccttgcttagtcataatctgcccgccgattttgctgcgttgcgtaaattgatgatgaatcatcagtaaaatctattcattatctcaatcaggccgggtttgcttttatgcagcccggcttttttatgaagaaattatggagaaaaatgacagggaaaaaggagaaattctcaataaatgcggtaacttagagattaggattgcggagaataacaaccgccgttctcatcgagtaatctccggatatcgacccataacgggcaatgataaaaggagtaacctgtgaaaaagatgcaatctatcgtactcgcactttccctggttctggtcgctcccatggcagcacaggctgcggaaattacgttagtcccgagtgtaaaattacagataggcgatcgtgataatcgtggctattactgggatggaggtcactggcgcgaccacggctggtggaaacaacattatgaatggcgaggcaatcgctggcacctacacggaccgccgccaccgccgcgccaccataagaaagctcctcatgatcatcacggcggtcatggtccaggcaaacatcaccgctaaatgacaaatgccgggtaacaatccggcattcagcgcctgatgcgacgctggcgcgtcttatcaggcctacgttaattctgcaatatattgaatctgcatgcttttgtaggcaggataaggcgttcacgccgcatccggcattgactgcaaacttaacgctgctcgtagcgtttaaacaccagttcgccattgctggaggaatcttcatcaaagaagtaaccttcgctattaaaaccagtcagttgctctggtttggtcagccgattttcaataatgaaacgactcatcagaccgcgtgctttcttagcgtagaagctgatgatcttaaatttgccgttcttctcatcgaggaacaccggcttgataatctcggcattcaatttcttcggcttcacgcttttaaaatactcatcactcgccagattaatcaccacattatcgccttgtgctgcgagcgcctcgttcagcttgttggtgatgatatctccccagaattgatacagatctttccctcgggcattctcaagacggatccccatttccagacgataaggctgcattaaatcgagcgggcggagtacgccatacaagccggaaagcattcgcaaatgctgttgggcaaaatcgaaatcgtcttcgctgaaggtttcggcctgcaagccggtgtagacatcacctttaaacgccagaatcgcctggcgggcattcgccggcgtgaaatctggctgccagtcatgaaagcgagcggcgttgatacccgccagtttgtcgctgatgcgcatcagcgtgctaatctgcggaggcgtcagtttccgcgcctcatggatcaactgctgggaattgtctaacagctccggcagcgtatagcgcgtggtggtcaacgggctttggtaatcaagcgttttcgcaggactaataagaatcagcatatccagtccttgcaggaaatttatgccgactttagcaaaaaatgagaatgagttgatcgatagttgtgattactcctggctaacatcatcccacgcgtccggagaaagctggcgaccgatatccggataacgcaatggatcaaacaccgggcgcacgccgagtttacgctggcgtagataatcactggcaatggtatgaaccacagggctgagcagtaaaatggcggtcaaattggtaatagccatgcaggccattatgatatctgccagttgccacatcagcggaaggcttagcaaggtgccgccgatgaccgttgcgaaggtgcagatccgcaaacaccagatcgctttagggttgttcaggcgtaaaaagaagagattgttttcggcataaatgtagttggcaacgatggagctgaaggcaaacagaataaccacaagggtaacaaactcagcaccccaggaacccattagcacccgcatcgccttctggataagctgaataccttccagcggcatgtaggttgtgccgttacccgccagtaatatcagcatggcgcttgccgtacagatgaccagggtgtcgataaaaatgccaatcatctggacaatcccttgcgctgccggatgcggaggccaggacgccgctgccgctgccgcgtttggcgtgctacccattcccgcctcattggaaaacatactgcgctgaaaaccgttagtaatcgcctggcttaaggtatatcccgccgcgccgcctgccgcttcctgccagccaaaagcactctcaaaaatagaccaaatgacgtggggaagttgcccgatattcattacgcaaattaccaggctggtcagtacccagattatcgccatcaacgggacaaagccctgcatgagccgggcgacgccatgaagaccgcgagtgattgccagcagagtaaagacagcgagaataatgcctgtcaccagcgggggaaaatcaaaagaaaaactcagggcgcgggcaacggcgttcgcttgaactccgctgaaaattatgccataggcgatgagcaaaaagacggcgaacagaacgcccatccagcgcatccccagcccgcgcgccatataccatgccggtccgccacgaaactgcccattgacgtcacgttctttataaagttgtgccagagaacattcggcaaagctggtcgccatgccgataaacgcggcaacccacatccaaaagacggctccaggtccaccggcggtaatagccagcgcaacgccggccaggttgccgctacccacgcgcgccgcaagactggtacacaaactctgaaaactggttaaaccgcctggctgtggatgaatgctatttttaagacttttgccaaactggcggatgtagcgaaactgcacaaatccggtgcgaaaagtgaaccaacaacctgcgccgaagagcaggtaaatcattacgcttccccaaaggacgctgttaatgaaggagaaaaaatctggcatgcatatccctcttattgccggccgcgatgactttcctgtgtaaacgttaccaattgtttaagaagtatatacgctacgaggtacttgataacttctgcgtagcatacatgaggttttgtataaaaatggcgggcgatatcaacgcagtgtcagaaatccgaaacagtctcgcctggcgataaccgtcttgtcggcggttgcgctgacgttgcgtcgtgatatcatcagggcagaccggttacatccccctaacaagctgtttaaagagaaatactatcatgacggacaaattgacctcccttcgtcagtacaccaccgtagtggccgacactggggacatcgcggcaatgaagctgtatcaaccgcaggatgccacaaccaacccttctctcattcttaacgcagcgcagattccggaataccgtaagttgattgatgatgctgtcgcctgggcgaaacagcagagcaacgatcgcgcgcagcagatcgtggacgcgaccgacaaactggcagtaaatattggtctggaaatcctgaaactggttccgggccgtatcagtactgaagttgatgcgcgtctttcctatgacaccgaagcgagtattgcgaaagcaaaacgcctgatcaaactctacaacgatgctggtattagcaacgatcgtattctgatcaaactggcttctacctggcagggtatccgtgctgcagaacagctggaaaaagaaggcatcaactgtaacctgaccctgctgttctccttcgctcaggctcgtgcttgtgcggaagcgggcgtgttcctgatcagcccgtttgttggccgtattcttgactggtacaaagcgaataccgataagaaagagtacgctccggcagaagatccgggcgtggtttctgtatctgaaatctaccagtactacaaagagcacggttatgaaaccgtggttatgggcgcaagcttccgtaacatcggcgaaattctggaactggcaggctgcgaccgtctgaccatcgcaccggcactgctgaaagagctggcggagagcgaaggggctatcgaacgtaaactgtcttacaccggcgaagtgaaagcgcgtccggcgcgtatcactgagtccgagttcctgtggcagcacaaccaggatccaatggcagtagataaactggcggaaggtatccgtaagtttgctattgaccaggaaaaactggaaaaaatgatcggcgatctgctgtaatcattcttagcgtgaccgggaagtcggtcacgctacctcttctgaagcctgtctgtcactcccttcgcagtgtatcattctgtttaacgagactgtttaaacggaaaaatcttgatgaatactttacgtattggcttagtttccatctctgatcgcgcatccagcggcgtttatcaggataaaggcatccctgcgctggaagaatggctgacaagcgcgctaaccacgccgtttgaactggaaacccgcttaatccccgatgagcaggcgatcatcgagcaaacgttgtgtgagctggtggatgaaatgagttgccatctggtgctcaccacgggcggaactggcccggcgcgtcgtgacgtaacgcccgatgcgacgctggcagtagcggaccgcgagatgcctggctttggtgaacagatgcgccagatcagcctgcattttgtaccaactgcgatccttagccgtcaggtgggcgtgattcgcaaacaggcgctgatccttaacttacccggtcagccgaagtctattaaagagacgctggaaggtgtgaaggacgctgagggtaacgttgtggtacacggtatttttgccagcgtaccgtactgcattcagttgctggaagggccatacgttgaaacggcaccggaagtggttgcagcattcagaccgaagagtgcaagacgcgacgttagcgaataaaaaaatccccccgagcggggggatctcaaaacaattagtgggattcaccaatcggcagaacggtgcgaccaaactgctcgttcagtacttcacccatcgccagatagattgcgctggcaccgcagatcagcccaatccagccggcaaagtggatgattgcggcgttaccggcaatgttaccgatcgccagcagggcaaacagcacggtcaggctaaagaaaacgaattgcagaacgcgtgcgcctttcagcgtgccgaagaacataaacagcgtaaatacgccccacagacccaggtagacaccaaggaactgtgcatttggcgcatcggtcagacccagtttcggcatcagcagaatcgcaaccagcgtcagccagaaagaaccgtaagaggtgaatgcggttaaaccgaaagtgttgccttttttgtactccagcagaccagcaaaaatttgcgcgatgccgccgtagaaaatgcccatggcaagaataatgccgtccagagcgaaataacccacgttgtgcaggttaagcagaatggtggtcatgccgaagcccatcaggcccagcggtgccggattagccaacttagtgttgcccataattcctcaaaaatcatcatcgaatgaatggtgaaataatttccctgaataactgtagtgttttcagggcgcggcataataatcagccagtggggcagtgtctacgatcttttgaggggaaaatgaaaattttccccggtttccggtatcagacctgagtggcgctaaccatccggcgcaggcaggcgatttgcagtacggctggaatcgtcacgcgataggcgctgccgctgaccgctttaaccccatttagtgccgcacctacagggccttccagccccgcgccgcgcagcaaaccatgcccaagtacgctcattgctgcgtgggtgcgtaaaatgcgggtcagttggctggaaagcaaatggctcacaccttttgccaataatttgtctttcatcagcagcggcagcagctcttccagctcattcaccctggcatcgaccgcgtgcagaaactcctgcttatgttcctcgtccattttcttccaggtattacgcagaaattgttccagtaactgttgctcaatttcaaacgtagacatctctttgtcggctttcagcttcaatcgcttactaacatcgagcaaaatggcccgatacaatttaccgtgtccgcgcagtttgttggcgatactatcgccaccaaaatgctgtaattctccggcaatcagctgccagttgcggcgatgttgctcgggatgcccttccatgcttttaaacagttcgttgcgcatcagtacgctggagaggcgagttttgcctttttcattatgggtgagcaatcgggcgaaatttgccaactgttcctcactacaatgctgaagaaaatccagatcactatcattcaggtaattaacattcattttttgtggcttctatattctggcgttagtcgtcgccgataattttcagcgtggccatatcgctactgttcaccgtatgaccgctaaaggtgattttactgacgcagcgtttattgtcgttatcgctgttaatgttgatccagtcagtggtttgcccttcttttatttcactaggaatattcaggctctgactggcgctacgggcggctttgaaataaacgcttgcaccgcttaactgtaaatcgccatggtcggcagagagttgtatgcgtttcacaatgcgacaaacaggaagtttcagcgccagatcgttggtttcgttacgcggcattgcaatggcgccgaggagtttatggtcgtttgcctgcgccgtgcagcacagcatcaggctaatcgccaggctggcggaaatcgtaaaaacggatttcataaggattctcttagtgggaagaggtagggggatgaatacccactagtttactgctgataaagagaagattcaggcacgtaatcttttctttttattacaattttttgatgaatgccttggctgcgattcattctttatatgaataaaattgctgtcaattttacgtcttgtcctgccatatcgcgaaatttctgcgcaaaagcacaaaaaatttttgcatctcccccttgatgacgtggtttacgaccccatttagtagtcaaccgcagtgagtgagtctgcaaaaaaatgaaattgggcagttgaaaccagacgtttcgcccctattacagactcacaaccacatgatgaccgaatatatagtggagacgtttagatgggtaaaataattggtatcgacctgggtactaccaactcttgtgtagcgattatggatggcaccactcctcgcgtgctggagaacgccgaaggcgatcgcaccacgccttctatcattgcctatacccaggatggtgaaactctagttggtcagccggctaaacgtcaggcagtgacgaacccgcaaaacactctgtttgcgattaaacgcctgattggtcgccgcttccaggacgaagaagtacagcgtgatgtttccatcatgccgttcaaaattattgctgctgataacggcgacgcatgggtcgaagttaaaggccagaaaatggcaccgccgcagatttctgctgaagtgctgaaaaaaatgaagaaaaccgctgaagattacctgggtgaaccggtaactgaagctgttatcaccgtaccggcatactttaacgatgctcagcgtcaggcaaccaaagacgcaggccgtatcgctggtctggaagtaaaacgtatcatcaacgaaccgaccgcagctgcgctggcttacggtctggacaaaggcactggcaaccgtactatcgcggtttatgacctgggtggtggtactttcgatatttctattatcgaaatcgacgaagttgacggcgaaaaaaccttcgaagttctggcaaccaacggtgatacccacctggggggtgaagacttcgacagccgtctgatcaactatctggttgaagaattcaagaaagatcagggcattgacctgcgcaacgatccgctggcaatgcagcgcctgaaagaagcggcagaaaaagcgaaaatcgaactgtcttccgctcagcagaccgacgttaacctgccatacatcactgcagacgcgaccggtccgaaacacatgaacatcaaagtgactcgtgcgaaactggaaagcctggttgaagatctggtaaaccgttccattgagccgctgaaagttgcactgcaggacgctggcctgtccgtatctgatatcgacgacgttatcctcgttggtggtcagactcgtatgccaatggttcagaagaaagttgctgagttctttggtaaagagccgcgtaaagacgttaacccggacgaagctgtagcaatcggtgctgctgttcagggtggtgttctgactggtgacgtaaaagacgtactgctgctggacgttaccccgctgtctctgggtatcgaaaccatgggcggtgtgatgacgacgctgatcgcgaaaaacaccactatcccgaccaagcacagccaggtgttctctaccgctgaagacaaccagtctgcggtaaccatccatgtgctgcagggtgaacgtaaacgtgcggctgataacaaatctctgggtcagttcaacctagatggtatcaacccggcaccgcgcggcatgccgcagatcgaagttaccttcgatatcgatgctgacggtatcctgcacgtttccgcgaaagataaaaacagcggtaaagagcagaagatcaccatcaaggcttcttctggtctgaacgaagatgaaatccagaaaatggtacgcgacgcagaagctaacgccgaagctgaccgtaagtttgaagagctggtacagactcgcaaccagggcgaccatctgctgcacagcacccgtaagcaggttgaagaagcaggcgacaaactgccggctgacgacaaaactgctatcgagtctgcgctgactgcactggaaactgctctgaaaggtgaagacaaagccgctatcgaagcgaaaatgcaggaactggcacaggtttcccagaaactgatggaaatcgcccagcagcaacatgcccagcagcagactgccggtgctgatgcttctgcaaacaacgcgaaagatgacgatgttgtcgacgctgaatttgaagaagtcaaagacaaaaaataatcgccctataaacgggtaattatactgacacgggcgaaggggaatttcctctccgcccgtgcattcatctaggggcaatttaaaaaagatggctaagcaagattattacgagattttaggcgtttccaaaacagcggaagagcgtgaaatcagaaaggcctacaaacgcctggccatgaaataccacccggaccgtaaccagggtgacaaagaggccgaggcgaaatttaaagagatcaaggaagcttatgaagttctgaccgacagccaaaaacgtgcggcatacgatcagtatggtcatgctgcgtttgagcaaggtggcatgggcggcggcggttttggcggcggcgcagacttcagcgatatttttggtgacgttttcggcgatatttttggcggcggacgtggtcgtcaacgtgcggcgcgcggtgctgatttacgctataacatggagctcaccctcgaagaagctgtacgtggcgtgaccaaagagatccgcattccgactctggaagagtgtgacgtttgccacggtagcggtgcaaaaccaggtacacagccgcagacttgtccgacctgtcatggttctggtcaggtgcagatgcgccagggattcttcgctgtacagcagacctgtccacactgtcagggccgcggtacgctgatcaaagatccgtgcaacaaatgtcatggtcatggtcgtgttgagcgcagcaaaacgctgtccgttaaaatcccggcaggggtggacactggagaccgcatccgtcttgcgggcgaaggtgaagcgggcgagcatggcgcaccggcaggcgatctgtacgttcaggttcaggttaaacagcacccgattttcgagcgtgaaggcaacaacctgtattgcgaagtcccgatcaacttcgctatggcggcgctgggtggcgaaatcgaagtaccgacccttgatggtcgcgtcaaactgaaagtgcctggcgaaacccagaccggtaagctattccgtatgcgcggtaaaggcgtcaagtctgtccgcggtggcgcacagggtgatttgctgtgccgcgttgtcgtcgaaacaccggtaggcctgaacgaaaggcagaaacagctgctgcaagagctgcaagaaagcttcggtggcccaaccggcgagcacaacagcccgcgcagtaagagcttctttgatggtgtgaagaagttttttgacgacctgacccgctaacctccccaaaagcctgcccgtgggcaggcctgggtaaaaatagggtgcgttgaagatatgcgagcacctgtaaagtggcggggatcactctacctcaatgtgtatcacaatatccatattctttgtgggggagtctggagattgagtagatattcttgttcagaatgtatcagccgatggttctacgattcttaagccacgaagagttcagatagtacaacggcatgtctcttttgactatctggcaaccggcagtgtgttctctcacgcatcacaaaagcagcaggcataaaaaaacccgcttgcgcgggctttttcacaaagcttcagcaaattggcgattaagccagtttgttgatctgtgcagtcaggttagccttatgacgtgcagctttgtttttgtggatcagacctttagcagcctgacggtccacgatcggttgcatttcgttaaatgctttctgtgcagcagctttgtcgccagcttcgatagctgcgtatactttcttgatgaaagtacgcatcatagagcgacggcttgcgttgtgcttacgagccttttcagactgaatggcgcgcttcttagcacttttgatattagccaaggtccaactcccaaatgtgttctatatggacaattcaaaggccgaggaatatgcccttttagccttcttttgtcaatggatttgtgcaaataagcgccgttaatgtgccggcacagcttacgtagtgatggcgcaggattctaccagcttgcggggtgtgaatacagcttttccgcgataaaaattgcagcaggcggtcagtttcttcccgtgatttgcgccatggcaatgaaaagccacttctttctgattagcgtactcaatcgccggttaaccttgaccgctgtacaaggtatactcggacgatttagcctgttttgagccagacatgaagctgatacgcggcatacataatctcagccaggccccgcaagaagggtgtgtgctgactattggtaatttcgacggcgtgcatcgcggtcatcgcgcgctgttacagggcttgcaggaagaagggcgcaagcgcaacttaccggtgatggtgatgctttttgaacctcaaccactggaactgtttgctaccgataaagccccggcaagactgacccggctgcgggaaaaactgcgttaccttgcagagtgtggcgttgattacgtgctgtgcgtgcgtttcgacaggcgtttcgcggcgttaaccgcgcaaaatttcatcagcgatcttctggtgaagcatttgcgcgtaaaatttcttgccgtaggtgatgatttccgctttggcgctggtcgtgaaggcgatttcttgttattacagaaagctggcatggaatacggcttcgatatcaccagtacgcaaactttttgcgaaggtggcgtgcgcatcagcagcaccgccgtgcgtcaggcccttgcggatgacaatctggctctggcagagagtttactggggcacccgtttgccatctccgggcgtgtagtccacggtgatgaattagggcgcactataggtttcccgacggcgaatgtaccgctgcgccgtcaggtttccccggtgaaaggggtttatgcggtagaagtgctgggcctcggtgaaaagccgttacccggcgtggcaaacatcggaacacgcccaacggttgccggtattcgccagcagctggaagtgcatttgttagatgttgcaatggacctttacggtcgccatatacaagtagtgctgcgtaaaaaaatacgcaatgagcagcgatttgcgagcctggacgaactgaaagcgcagattgcgcgtgatgaattaaccgcccgcgaattttttgggctaacaaaaccggcttaagcctgttatgtaatcaaaccgaaatacggaaccgagaatctgatgagtgactataaaagtaccctgaatttgccggaaacagggttcccgatgcgtggcgatctcgccaagcgcgaacccggaatgctggcgcgttggactgatgatgatctgtacggcatcatccgtgcggctaaaaaaggcaaaaaaaccttcattctgcatgatggccctccttatgcgaatggcagcattcatattggtcacagcgttaacaagattctgaaagacattatcgtgaagtccaaagggctttccggttatgacagcccgtatgtgcctggctgggactgccacggtctgccgatcgagctgaaagtcgagcaagaatacggtaagccgggtgagaaattcaccgccgccgagttccgcgccaagtgccgcgaatacgcggcgacccaggttgacggtcaacgcaaagactttatccgtctgggcgtgctgggcgactggagccacccgtacctgaccatggacttcaaaactgaagccaacatcatccgcgcgctgggcaaaatcatcggcaacggtcacctgcacaaaggcgcgaagccagttcactggtgcgttgactgccgttctgcgctggcggaagcggaagttgagtattacgacaaaacttctccgtccatcgacgttgctttccaggcagtcgatcaggatgcactgaaagcaaaatttgccgtaagcaacgttaacggcccaatcagcctggtaatctggaccaccacgccgtggactctgcctgccaaccgcgcaatctctattgcaccagatttcgactatgcgctggtgcagatcgacggtcaggccgtgattctggcgaaagatctggttgaaagcgtaatgcagcgtatcggcgtgaccgattacaccattctcggcacggtaaaaggtgcggagcttgagctgctgcgctttacccatccgtttatgggcttcgacgttccggcaatcctcggcgatcacgttaccctggatgccggtaccggtgccgttcacaccgcgcctggccacggcccggacgactatgtgatcggtcagaaatacggcctggaaaccgctaacccggttggcccggacggcacttatctgccgggcacttatccgacgctggatggcgtgaacgtcttcaaagcgaacgacatcgtcgttgcgctgctgcaggaaaaaggcgcgctgctgcacgttgagaaaatgcagcacagctatccgtgctgctggcgtcacaaaacgccgatcatcttccgcgcgacgccgcagtggttcgtcagcatggatcagaaaggtctgcgtgcgcagagtctgaaagagatcaaaggcgtgcagtggatcccggactggggccaggcgcgtatcgagagcatggttgctaaccgtcctgactggtgtatctcccgtcagcgcacctggggtgtaccgatgagtctgttcgtgcacaaagacacggaagagctgcatccgcgtacccttgaactgatggaagaagtggcaaaacgcgttgaagtcgatggcatccaggcgtggtgggatctcgatgcgaaagagatcctcggcgacgaagctgatcagtacgtgaaagtgccggacacattggatgtatggtttgactccggatctacccactcttctgttgttgacgtgcgtccggaatttgccggtcacgcagcggacatgtatctggaaggttctgaccaacaccgcggctggttcatgtcttccctaatgatctccaccgcgatgaagggtaaagcgccgtatcgtcaggtactgacccacggctttaccgtggatggtcagggccgcaagatgtctaaatccatcggcaataccgttagcccgcaggatgtgatgaacaaactgggcgcggatattctgcgtctgtgggtggcaagtaccgactacaccggtgaaatggccgtttctgacgagatcctgaaacgtgctgccgatagctatcgtcgtatccgtaacaccgcgcgcttcctgctggcaaacctgaacggttttgatccagcaaaagatatggtgaaaccggaagagatggtggtactggatcgctgggccgtaggttgtgcgaaagcggcacaggaagacatcctcaaggcgtacgaagcatacgatttccacgaagtggtacagcgtctgatgcgcttctgctccgttgagatgggttccttctacctcgacatcatcaaagaccgtcagtacaccgccaaagcggacagtgtggcgcgtcgtagctgccagactgcgctatatcacatcgcagaagcgctggtgcgctggatggcaccaatcctctccttcaccgctgatgaagtgtggggctacctgccgggcgaacgtgaaaaatacgtcttcaccggtgagtggtacgaaggcctgtttggcctggcagacagtgaagcgatgaacgatgcgttctgggacgagctgttgaaagtgcgtggcgaagtgaacaaagtcattgagcaagcgcgtgccgacaagaaagtgggtggcagcctggaagcggcagtaaccttgtatgcagaaccggaactgagcgcgaaactgaccgcgctgggcgatgaattacgatttgtcctgttgacctccggcgctaccgttgcagactataacgacgcacctgctgatgctcagcagagcgaagtactcaaagggctgaaagtcgcgttgagtaaagccgaaggtgagaagtgcccacgctgctggcactacacccaggatgtcggcaaggtggcggaacacgcagaaatctgcggccgctgtgtcagcaacgtcgccggtgacggtgaaaaacgtaagtttgcctgatgagtcaaagcatctgtagtacagggctacgctggctgtggctggtggtagtcgtgctgattatcgatctgggcagcaaatacctgatcctccagaactttgctctgggggatacggtcccgctgttcccgagccttaatctgcattatgcgcgtaactatggcgcggcgtttagtttccttgccgatagcggcggctggcagcgttggttctttgccggtattgcgattggtattagcgtgatcctggcagtgatgatgtatcgcagcaaggccacgcagaagctaaacaatatcgcttacgcgctgattattggcggcgcgctgggcaacctgttcgaccgcctgtggcacggcttcgttgtcgatatgatcgacttctacgtcggcgactggcacttcgccaccttcaaccttgccgatactgccatctgtgtcggtgcggcactgattgtgctggaaggttttttgccttctagagcgaaaaaacaataataaaccctgccggatgcgatgctgacgcatcttatccggcctacagattgctgcgaaatcgtaggccggataaggcgtttacgccgcatccggcaaaaatccttaaatataagagcaaacctgcatgtctgaatctgtacagagcaatagcgccgtcctggtgcacttcacgctaaaactcgacgatggcaccaccgccgagtctacccgcaacaacggtaaaccggcgctgttccgcctgggtgatgcttctctttctgaagggctggagcaacacctgttggggctgaaagtgggcgataaaaccaccttcagcttggagccagatgcggcgtttggcgtgccgagtccggacctgattcagtacttctcccgccgtgaatttatggatgcaggcgagccagaaattggcgcaatcatgctttttaccgcaatggatggcagtgagatgcctggcgtgatccgcgaaattaacggcgactccattaccgttgatttcaaccatccgctggccgggcagaccgttcattttgatattgaagtgctggaaatcgatccggcactggaggcgtaacatgcagatcctgttggccaacccgcgtggtttttgtgccggggtagaccgcgctatcagcattgttgaaaacgcgctggccatttacggcgcaccgatatatgtccgtcacgaagtggtacataaccgctatgtggtcgatagcttgcgtgagcgtggggctatctttattgagcagattagcgaagtaccggacggcgcgatcctgattttctccgcacacggtgtttctcaggcggtacgtaacgaagcaaaaagtcgcgatttgacggtgtttgatgccacctgtccgctggtgaccaaagtgcatatggaagtcgcccgcgccagtcgccgtggcgaagaatctattctcatcggtcacgccgggcacccggaagtggaagggacaatgggccagtacagtaacccggaagggggaatgtatctggtcgaaagcccggacgatgtgtggaaactgacggtcaaaaacgaagagaagctctcctttatgacccagaccacgctgagcgtggatgacacgtctgatgtgatcgacgcgctgcgtaaacgcttcccgaaaattgtcggtccgcgcaaagatgacatctgctacgccacgactaaccgtcaggaagcggtacgcgccctggcagaacaggcggaagttgtgttggtggtcggtagcaaaaactcctccaactccaaccgtctggcggagctggcccagcgtatgggcaaacgcgcgtttttgattgacgatgcgaaagacatccaggaagagtgggtgaaagaggttaaatgcgtcggcgtgactgcgggcgcaagcgctccggatattctggtgcagaatgtggtggcgcgtttgcagcagctgggcggtggtgaagccattccgctggaaggccgtgaagaaaacattgttttcgaagtgccgaaagagctgcgtgtcgatattcgtgaagtcgattaagtcattagcagcctaagttatgcgaaaatgccggtcttgttaccggcattttttatggagaaaacatgcgtttacctatcttcctcgatactgaccccggcattgacgatgccgtcgccattgccgccgcgatttttgcacccgaactcgacctgcaactgatgaccaccgtcgcgggtaatgtcagcgttgagaaaactacccgcaatgccctgcaactgctgcatttctggaatgcggagattccgctcgcccaaggggccgctgtgccactggtacgcgcaccgcgtgatgcggcatctgtgcacggcgaaagcggaatggctggctacgactttgttgagcacaaccgaaagccgctcgggataccggcgtttctggcgattcgggatgccctgatgcgtgcaccagagcctgttaccctggtggccatcggcccgttaaccaatattgcgctgttacttagtcaatgcccggaatgcaagccgtatattcgccgtctggtgatcatgggtggttctgccggacgcggcaactgtacgccaaacgccgagtttaatattgctgccgatccagaagctgctgcctgtgtcttccgcagtggtattgaaatcgtcatgtgcggtttggatgtcaccaatcaggcaatattaactcctgactatctctctacactgccgcagttaaaccgtaccgggaaaatgcttcacgccctgtttagccactaccgtagcggcagtatgcaaagcggcttgcgaatgcacgatctctgcgccatcgcctggctggtgcgcccggacctgttcactctcaaaccctgttttgtggcagtggaaactcagggcgaatttaccagtggcacgacggtggttgatatcgacggttgcctgggcaagccagccaatgtacaggtggcattggatctggatgtgaaaggcttccagcagtgggtggctgaggtgctggctctggcgagctaacctgtcacatgttattggcatgcagtcattcatcgactcatgcctttcactgatatccctccctgtttatcattaatttctaattatcagcgtttttggctggcggcgtagcgatgcgctggttactctgaaaacggtctatgcaaattaacaaaagagaatagctatgcatgatgcaaacatccgcgttgccatcgcgggagccggggggcgtatgggccgccagttgattcaggcggcgctggcattagagggcgtgcagttgggcgctgcgctggagcgtgaaggatcttctttactgggcagcgacgccggtgagctggccggagccgggaaaacaggcgttaccgtgcaaagcagcctcgatgcggtaaaagatgattttgatgtgtttatcgattttacccgtccggaaggtacgctgaaccatctcgctttttgtcgccagcatggcaaagggatggtgatcggcactacggggtttgacgaagccggtaaacaagcaattcgtgacgccgctgccgatattgcgattgtctttgctgccaattttagcgttggcgttaacgtcatgcttaagctgctggagaaagcagccaaagtgatgggtgactacaccgatatcgaaattattgaagcacatcatagacataaagttgatgcgccgagtggcaccgcactggcaatgggagaggcgatcgcccacgcccttgataaagatctgaaagattgcgcggtctacagtcgtgaaggccacaccggtgaacgtgtgcctggcaccattggttttgccaccgtgcgtgcaggtgacatcgttggtgaacataccgcgatgtttgccgatattggcgagcgtctggagatcacccataaggcgtccagccgtatgacatttgctaacggcgcggtaagaagcgctttgtggttgagtggtaaggaaagcggtctttttgatatgcgagatgtacttgatctcaataatttgtaaccacaaaatatttgttatggtgcaaaaataacacatttaatttattgattataaagggctttaatttttggcccttttatttttggtgttatgtttttaaattgtctataagtgccaaaaattacatgttttgtcttctgtttttgttgttttaatgtaaattttgaccatttggtccacttttttctgctcgtttttatttcatgcaatcttcttgctgcgcaagcgttttccagaacaggttagatgatctttttgtcgcttaatgcctgtaaaacatgcatgagccacaaaataatataaaaaatcccgccattaagttgacttttagcgcccatatctccagaatgccgccgtttgccagaaattcgtcggtaagcagatttgcattgatttacgtcatcattgtgaattaatatgcaaataaagtgagtgaatattctctggagggtgttttgattaagagtgcgctattggttctggaagacggaacccagtttcacggtcgggccataggggcaacaggtagcgcggttggggaagtcgttttcaatactagtatgaccggttatcaagaaatcctcactgatccttcctattctcgtcaaatcgttactcttacttatccccatattggcaatgtcggcaccaatgacgccgatgaagaatcttctcaggtacatgcacaaggtctggtgattcgcgacctgccgctgattgccagcaacttccgtaataccgaagacctctcttcttacctgaaacgccataacatcgtggcgattgccgatatcgatacccgtaagctgacgcgtttactgcgcgagaaaggcgcacagaatggctgcattatcgcgggcgataacccggatgcggcgctggcgttagaaaaagcccgcgcgttcccaggtctgaatggcatggatctggcaaaagaagtgaccaccgcagaagcctatagctggacacaagggagctggacgttgaccggtggcctgccagaagcgaaaaaagaagacgagctgccgttccacgtcgtggcttatgattttggtgccaagcgcaacatcctgcggatgctggtggatagaggctgtcgcctgaccatcgttccggcgcaaacttctgcggaagatgtgctgaaaatgaatccagacggcatcttcctctccaacggtcctggcgacccggccccgtgcgattacgccattaccgccatccagaaattcctcgaaaccgatattccggtattcggcatctgtctcggtcatcagctgctggcgctggcgagcggtgcgaagactgtcaaaatgaaatttggtcaccacggcggcaaccatccggttaaagatgtggagaaaaacgtggtaatgatcaccgcccagaaccacggttttgcggtggacgaagcaacattacctgcaaacctgcgtgtcacgcataaatccctgttcgacggtacgttacagggcattcatcgcaccgataaaccggcattcagcttccaggggcaccctgaagccagccctggtccacacgacgccgcgccgttgttcgaccactttatcgagttaattgagcagtaccgtaaaaccgctaagtaatcaggagtaaaagagccatgccaaaacgtacagatataaaaagtatcctgattctgggtgcgggcccgattgttatcggtcaggcgtgtgagtttgactactctggcgcgcaagcgtgtaaagccctgcgtgaagagggttaccgcgtcattctggtgaactccaacccggcgaccatcatgaccgacccggaaatggctgatgcaacctacatcgagccgattcactgggaagttgtacgcaagattattgaaaaagagcgcccggacgcggtgctgccaacgatgggcggtcagacggcgctgaactgcgcgctggagctggaacgtcagggcgtgttggaagagttcggtgtcaccatgattggtgccactgccgatgcgattgataaagcagaagaccgccgtcgtttcgacgtagcgatgaagaaaattggtctggaaaccgcgcgttccggtatcgcacacacgatggaagaagcgctggcggttgccgctgacgtgggcttcccgtgcattattcgcccatcctttaccatgggcggtagcggcggcggtatcgcttataaccgtgaagagtttgaagaaatttgcgcccgcggtctggatctctctccgaccaaagagttgctgattgatgagagcctgatcggctggaaagagtacgagatggaagtggtgcgtgataaaaacgacaactgcatcatcgtctgctctatcgaaaacttcgatgcgatgggcatccacaccggtgactccatcactgtcgcgccagcccaaacgctgaccgacaaagaatatcaaatcatgcgtaacgccagcatggcggtgctgcgtgaaatcggcgttgaaaccggtggttccaacgttcagtttgcggtgaacccgaaaaacggtcgtctgattgttatcgaaatgaacccacgcgtgtcccgttctagcgcgctggcgagcaaagcgaccggtttcccgattgctaaagtggcggcgaaactggcggtgggttacaccctcgacgaactgatgaacgacatcactggcggacgtactccggcctccttcgagccgtccatcgactatgtggttactaaaattcctcgcttcaacttcgaaaaattcgccggtgctaacgaccgtctgaccactcagatgaaaagcgttggcgaagtgatggcgattggtcgcacgcagcaggaatccctgcaaaaagcgctgcgcggcctggaagtcggtgcgactggattcgacccgaaagtgagcctggatgacccggaagcgttaaccaaaatccgtcgcgaactgaaagacgcaggcgcagatcgtatctggtacatcgccgatgcgttccgtgcgggcctgtctgtggacggcgtcttcaacctgaccaacattgaccgctggttcctggtacagattgaagagctggtgcgtctggaagagaaagtggcggaagtgggcatcactggcctgaacgctgacttcctgcgccagctgaaacgcaaaggctttgccgatgcgcgcttggcaaaactggcgggcgtacgcgaagcggaaatccgtaagctgcgtgaccagtatgacctgcacccggtttataagcgcgtggatacctgtgcggcagagttcgccaccgacaccgcttacatgtactccacttatgaagaagagtgcgaagcgaatccgtctaccgaccgtgaaaaaatcatggtgcttggcggcggcccgaaccgtatcggtcagggtatcgaattcgactactgttgcgtacacgccagcctggcgctgcgcgaagacggttacgaaaccattatggttaactgtaacccggaaaccgtctccaccgactacgacacttccgaccgcctctacttcgagccggtaactctggaagatgtgctggaaatcgtgcgtatcgagaagccgaaaggcgttatcgtccagtacggcggtcagaccccgctgaaactggcgcgcgcgctggaagctgctggcgtaccggttatcggcaccagcccggatgctatcgaccgtgcagaagaccgtgaacgcttccagcatgcggttgagcgtctgaaactgaaacaaccggcgaacgccaccgttaccgctattgaaatggcggtagagaaggcgaaagagattggctacccgctggtggtacgtccgtcttacgttctcggcggtcgggcgatggaaatcgtctatgacgaagctgacctgcgtcgctacttccagacggcggtcagcgtgtctaacgatgcgccagtgttgctggaccacttcctcgatgacgcggtagaagttgacgtggatgccatctgcgacggcgaaatggtgctgattggcggcatcatggaacatattgagcaggcgggcgtgcactccggtgactccgcatgttctctgccagcctacaccttaagtcaggaaattcaggatgtgatgcgccagcaggtgcagaaactggccttcgaattgcaggtgcgcggcctgatgaacgtgcagtttgcggtgaaaaacaacgaagtctacctgattgaagttaacccgcgtgcggcgcgtaccgttccgttcgtctccaaagccaccggcgtaccgctggcaaaagtggcggcgcgcgtgatggctggcaaaagcctggctgagcagggcgtaaccaaagaagttatcccgccgtactacagcgtgaaagaagtggtgctgccgttcaataaattcccgggcgttgacccgctgttagggccagaaatgcgctctaccggggaagtcatgggcgtgggccgcaccttcgctgaagcgtttgccaaagcgcagctgggcagcaactccaccatgaagaaacacggtcgtgcgctgctttccgtgcgcgaaggcgataaagaacgcgtggtggacctggcggcaaaactgctgaaacagggcttcgagctggatgcgacccacggcacggcgattgtgctgggcgaagcaggtatcaacccgcgtctggtaaacaaggtgcatgaaggccgtccgcacattcaggaccgtatcaagaatggcgaatatacctacatcatcaacaccaccagtggccgtcgtgcgattgaagactcccgcgtgattcgtcgcagtgcgctgcaatataaagtgcattacgacaccaccctgaacggcggctttgccaccgcgatggcgctgaatgccgatgcgactgaaaaagtaattagcgtgcaggaaatgcacgcacagatcaaataatagcgtgtcatggcagatatttttcatccgctaatttgatcgaataactaatacggttctctgatgaggaccgtttttttttgcccattaagtaaatcttttggggaatcgatatttttgatgacataagcaggatttagctcacacttatcgacggtgaagttgcatactatcgatatatccacaattttaatatggccttgtttaattgcttcaaaacgagtcatagccagacttttaatttgtgaaactggagttcgtatgtgtgaaggatatgttgaaaaaccactctacttgttaatcgccgaatggatgatggctgaaaatcggtgggtgatagcaagagagatctctattcatttcgatattgaacacagcaaggcggttaataccctgacttatattctgagcgaagtcacagaaataagctgcgaagttaagatgatccctaataagctggaagggcggggatgccagtgtcagcgactggttaaagtggtcgatatcgatgagcaaatttacgcgcgcctgcgcaataacagtcgggaaaaattagtcggtgtaagaaagacgccgcgtattcctgccgttccgctcacggaacttaaccgcgagcagaagtggcagatgatgttgagtaagagtatgcgtcgttaattttatctcgttgataccgggcgtcctgcttgccagatgcgatgttgtagcatcttatccagcaaccaggtcgcatccggcaagatcaccgtttaggcgtcacatccgtcgtcccctgcaaacgggggcgattttcctccatttgcctcagtggctgcgtttcatgtaagcttacatgacagcgcccgacaagatcctgatactctttggtattcaaccgtttccagtgtaactcgtcgtcactaacattgcgtacagcgcgggctggcgtacccatcaacaactggcgtttctcgccgcgaaagcccgctttgacaaagctcatggcggcaacaatgctctcttcgccaatgaccgcgccatccataatcacgctgttcatcccgaccaatgcatcgcgaccaatcaaacaaccatgcaggatcgctccgtgcccgatatggccgttttccccaacgatagtgtcagtgtcgcagtagccatgcataatgcagccatcctgaatattggctcccgcttgcacgatcaaccgcccgtagtcaccacgcagactggcgagtgggccgatgtagacaccggctcccacaatcacatcgccaatcaagacggcactgggatggacaaacgccgtcgggtgaaccaccggaattaacccctcaaaggcgtaatagctcacggttgttaacgtcctttccacaccggatcgcgcttctcggcaaacgccagcggcccttcaatggcatcttcgctatgcagaacgcttggatagtgtttcaacacgccgctgcgaatatagcgatacgcttcttctaccggcatttcgctggtggtgcggtagatctctttcagcgccgcaatcgccagcggggcgctgttaaccagctgctgagccagttcgcgggcgttatccatcagttccgcctggctaaccacgcggttgactatcccccaacgcagcgcctcttctgcgcccattcgtctgccggtcatcaccatttcattgacgatggcaggcggcaggatcttcggcagacgcagcacaccgccgctgtcaggaacgatgcccagtttggcttccggcagggcgaagctggcgttatcggcacaaacaataaaatctgccgccagcgccagttcaaagccgccgccaaaggcatagccgttcacagctgcgataaccggtttgtcgagattgaaaatttcggttaatcccgcaaaaccacccggaccaaagtcagcatccggtgcttcgccttctgctgccgcttttaaatcccagcccgcggaaaagaacttctctccggcaccggtaataatggcgacacgtaattgcggatcgtcacggaaatttagaaatacttcgcccatttcaaagctggtttttgcatcaatagcattcgcttttggacgatcaagggtaatttccagaatacttccattgcgggtcagatgtaaactttcactcattccttttctccatttttgctttttcagggagctcaacatccctgcaaaaaatgcatattgttttagagtgtgattattagctggcagggtagttccctgctgtttcatttatttcagattctttctaattattttcccgctgcaattacgtggcagatcttttctgatctccagataagagggcactttaaatttcgccatattttgttcgcagaagcggaaaaattcctcttcgctcaatgtttcaccttcattcagcaccacaaatgctttgatggcttcatcgcgaatgctatctttaatacccacaaccacgatgtcctgaattttcgggtgcgcggcgataatattttccagctccacgcaggagacattctcgccgccacgtttaatcatattgcagcggcgatcgacgaaataaaaaaagtcctcttcgtcgcggtatccggtatcgccggtatgcagccagccatcggcttccagcactttcgcagtggcttgtgggttgagaaagtactctttgaagatggttttcccaggtatgcctttaatgcagatttcaccgatctcaccagccgggagcgggcgattgtgatcgtcgcggatctccgcttcgtagcaaaaccccacccgaccaatgctcggccagcgtcgtttatcgccaggacgatcgccgataatgcccacaatggtttccgtcatcccataagacgtcagcaagcgaacgccgaagcgttcacaaaacgcatctttttcctgctcgctcaagttgagataaaacatcacttcccgcaggcggtgttgctgatcgttcgcactaggcggctgtaccatcaacgtacggatcatcatcggaatacattcggtaacggtggcgcggtacttctgtacctgtccccagaaggcgcgggcgctgtatttctcgaccagcacaaaggtggccccggcagaaaacgccgccatcgccgcagtacactggcaatcgatatgaaacgcaggcattaccgtcaggtagacgtcatcgtcacgcagtgcacactgccaggcggagtaatatccagcgaagcgcaggttgtaatgggtaatcaccacacctttcggtcgggaggtggtgccggaggtgaagagaatttccgccgtatcgtcagtgcttagcggcggtgcatagcacaaggtggcaggttgttgatttttcagttgagtaaagctactcacgccatcatcagcgggaagtgccacatctgtcaggcaaatgtgccgcaattgagtggcatcttcctgctgaatctgttgatacataggatagaattgcgcactggtcaccagcaggcacgcctggctattttgcaggatccacgcgctttccttgcacaacaggcgggcgttaatcggcaccataatcgcgccaatttttgccagcccgaaccagcaaaagataaattccgggcagttgtcgagatgtagtgcaaccttgtcgcctttgcgaatccccagcgtataaaacaggtttgccgtgcggttaatctcctgatttaactcaagataactataccggttaacgactccgccgctggattcacaaatcagcgccgttttatgaccgtaaacgtccgcaagatcgtcccacatttgacgtagatgttgtccgccaatgatatccattgcacctctatccatttttgttcgtttgttattgggcgggcgctagtcaggcaagccgactgacgccacgcgtttagtcctcaactttggccagacctttgctgaccaactcctgaatgtcgttttcgctgtagccgatatttttcaaaatggcagccgtgtccataccatgactgggcattccgcgccagatttgtccggggttatttttgaatttcggcatgatgttcggccctttgcaggtgcgaccatccatcgtttgccactgagtgatactttcgcgagccacatactgtggattgctttccagttccggtacggtcagcactttggcgcaggcgatattcagttcagcaaagcgttcttttacttccgcgatggtatgtgtcgccagccaggcatcgagtttctcttcaaccagtgggccgtaagggcattcgatacggtggataagctgagtgccttccgggatttctggcgtgccaagcagatgtgcgaggccaatatctttaaagcactcttcaatttgggtaatgcccaccagttccatcacgatgtagccgtcggcacatttatacagaccgcaaccggcgtagtagggatctttacctttgctcatgcgcgggcacatttcgccgccgttgaagtaatccatcatgaagtactggcccatacgcagcatcacttcatacatggcgatgtcgatactttcgcctttaccggtttcacgcactttatgcagtgctgccagcgccgccgtggtggcggtcaggccagaaaagtaatcggcggtatacgggaaggcaggcattggctggtcaacatcaccgttctgaatcaggtaaccactaaaggcctgggcgatagtgttataggccggaagattggtgtactcctcggtgccgtactgaccaaaaccggacaggtgagcgataaccagtttcgggttgtgctgccacagtacttcatcggtaatgccacgacgggcaaaggccggacctttactggcttcgatgaagatatcggtggtttccattaatttcagaaacgcttcgcggccttcatctttgaaaatatttaagctcagcgcgtgcaaattgcggcgggagagttgcgggtagttcggttgaacgcgaatggtgtcggcccaggcgacgttctcgatccagataacttccgcgccccattctgcgaacatttgcccggcaaacggtccggcgatttcgataccggagaagacaacgcgcaatccggccaacggcccgaatttcggcatgggtagatgatccattatttgctcctgaaaaatttatgtagcgcatgactgccggatgcggcgtaaacgctttatccggcctacattcgtgctcccgtaggcctgataagacgcatcagcgtcgcatcaggcagcgcacggacttagcggtattgcttcagcaccgcacgacccagcgtcaggatctgcatttcgtcagatcccccggagacgcggtctacacgcagatcacgccagaagcggctgatgcggtggttgcccgcaatcccgacaccgcccagcacctgcattgcgctatccacaacttcaaatgccgcattggcgcagaagtatttgcacatcgctgcatcgccagaggtgatggtgccgttgtctgctttccacgctgcttcatacagcatgtttttcatggagtttaatttgatcgccatgtgggcgaatttttcctgaatcaactggaaacgaccaatagcctcgccaaactgcacgcgctgattggcgtagcgcgccgcatcttcaaaggcgcacatcgccgtaccgtagttggtgagggctaccaggaaacgttcatggtcgaactcttctttgacgcggttaaagccgttaccttcccgaccgaacatgtctttctcgtccagttccacgtcgtcaaaggtgatttcacagcagctatccatacgcagaccgagcttttcaagtttggtcactttgatgcccggtttgctcatatcaacaaaccattcggtgtagacaggtttgtccggagaagccccgtcgcgcgccatcaccacgatgtacggggtgtaggcgctgctggtaataaaacacttactaccattaagataaatcttaccatttctacgggtataagtcgttttcaggctacccacgtcggagcccgcgcccggttcggtaatcgcactgttccacatctgcttaccggtgccgcggaaagccataattttgtcgatctgctcttgtgtgccttcgcgcaggaaggtgttgaacccgcccggcaactggtacagcacataggttggtgcccccagacgtcccagctccatccacacggcggcgagagtaacaaaccccgcgtccagaccaccgtgctcttcagggatcagcagactgtcgatacccatatccgccagtgctttgacaaaacgttccgggtagacgctgtcacggtcgcactcggcaaaataggcctcccagttttcgctggccatcagttcgcggataccggcgacaaacagttcctgctcatcatttaaattaaaatccatctttcaacctcttgatattttgggggttaattaatctttccagttctgtttcgcgtctttaataaaggagagcgtcaccataatgttgacgaagaacagcgggcatcctccggcgataatggcggtttgaatcggtttcaggccgccgagcgccagcagaacaataccgataatgccaaccagaatactccaaccgatacgcaccagcagaggtggttcttcaccatcgcgtacttcgcggcaagtggacatcgccagggtataagagcaggcgttaaccagcgtaacggtggcaataaagcagaggatgaagaagccccacatggtggcggtgctgagtggcagagcggcccaggtttcaatgatggcgcgcgccacaccgtactgttcgatcagatttggaatgttgatgatgtttttatctatcaacagcagagtgttactaccgagtacagtccacaggatccaggtactcgctgtcagccccagcaccatgccgaagcacagttcacgcacagtacgaccacgggagatgcgggcgaggaagatactcatctggatagcataaatcacccaccatgcccagtagaacacggtccagccctgcgggaagccgcctttagcgatgggatcggtatagaacaacatgcgcggcagatacatcagcaacatccccacgctatcggtgaagtagttcatgatgaagctggcaccgctgacaatgaacacccaacccagcatcaggaagctcaggtaactacgcacgtcactggcgatacgtacccctttttgcagaccgcaagcgacgcaaatggcgttgaggataatccagcaggtaatgatgatagcgtccagttgcagggtatgcggaatgccaaacaaccattgcatacactcggtcaccagcggcgtggcaaggcccagactggtacccatcgcgaagatcaaggcgacgagatagaagttgtcgacgatagtgccgaacaaccctttggcgtgtttttcacctaccagcggcaccagtgtgctgctggggcgaatcacttccattttgcggacaaagaagaagtaagcgaaggcgacactaaggaagctgtaagtggcccacggcagaggtccccagtggaacaagctgtaagccagccccaactctttcgcccctgtgctgttcggttctaagccaaacggcggggtggagatgtagtagtagatctcaatgcttccccagaacagtacggcagcagacgtacaggaggcgaacatcataaagatccaactggcggtgctaaattctggcggttcgttacctaaacgctttttggcatacgggccaaacaccagccagaaccaaccgaaaagcatcaccaccatataccattcaaatgcccatccccatacattggtgacgtaactgaatacagcattaataacgacattcgctgcatccagatctctgactgtaagccaacaaagtatgccgacgattattaacggcggaaagaaaaccttcggttctattcccgtttttctcttttcattcttcatgagttaattccactgtgaaaacgaatatttattttgcgttcccgtttgttttatttttgttaacatttaatataattattattaacctcgtggacgcgttaatggctaactcataatgggtattcaataagctgtattctgtgattggtatcacatttttgtttcgggtgaatagagggcgttttttcgttaattttgattaataatcagtttgttatgctctgttgtgagtaaaaaataacatctgactttcaatattggtgatccataaaacaatattgaaaatttctttttgctacgccgtgttttcaatattggtgaggaacttaacaatattgaaagttggatttatctgcgtgtgacattttcaatattggtgattaaagttttatttcaaaattaaagggcgtgatatctgtaattaacaccaccgatatgaacgacgtttccttcatgatttctggagatgcaatgaagattattacttgctataagtgcgtgcctgatgaacaggatattgcggtcaataatgctgatggtagtttagacttcagcaaagccgatgccaaaataagccaatacgatctcaacgctattgaagcggcttgccagctaaagcaacaggcagcagaggcgcaggtgacagccttaagtgtgggcggtaaagccctgaccaacgccaaagggcgtaaagatgtgctaagccgcggcccggatgaactgattgtggtgattgatgaccagttcgagcaggcactgccgcaacaaacggcgagcgcactggctgcagccgcccagaaagcaggctttgatctgatcctctgtggcgatggttcttccgacctttatgcccagcaggttggtctgctggtgggcgaaatcctcaatattccggcagttaacggcgtcagcaaaattatctccctgacggcagataccctcaccgttgagcgcgaactggaagatgaaaccgaaaccttaagcattccgctgcctgcggttgttgctgtttccactgatatcaactccccacaaattcctagcatgaaagccattctcggcgcggcgaaaaagcccgtccaggtatggagcgcggcggatattggttttaacgcagaggcagcctggagtgaacaacaggttgccgcgccgaaacagcgcgaacgtcagcgcatcgtgattgaaggcgacggcgaagaacagatcgccgcatttgctgaaaatcttcgcaaagtcatttaattacaggggatgctatgaacacgttttctcaagtctgggtattcagcgataccccttctcgtctgccggaactgatgaacggtgcgcaggctttagctaatcaaatcaacacctttgtcctcaatgatgccgacggcgcacaggcaatccagctcggcgctaatcatgtctggaaattaaacggcaaaccggacgatcggatgatcgaagattacgccggtgtcatggctgacactattcgccagcacggcgcagacggcctggtgctgctgccaaacacccgtcgcggcaaattactggcggcaaaactgggttatcgccttaaagcggcggtgtctaacgatgccagcaccgtcagcgtacaggacggtaaagcgacagtgaaacacatggtttacggtggtctggcgattggcgaagaacgcattgccacgccgtatgcggtactgaccatcagcagcggcacgttcgatgcggctcagccagacgcgagtcgcactggcgaaacgcacaccgtggagtggcaggctccggctgtggcgattacccgcacggcaacccaggcgcgccagagcaacagcgtcgatctcgacaaagcccgtctggtggtcagcgtcggtcgcggtattggcagcaaagagaacattgcgctggcagaacagctttgcaaggcgataggtgcggagttggcctgttctcgtccggtggcggaaaacgaaaaatggatggagcacgaacgctatgtcggtatctccaacctgatgctgaaacctgaactgtacctggcggtggggatctccgggcagatccagcacatggttggcgctaacgcgagccaaaccattttcgccatcaataaagataaaaatgcgccgatcttccagtacgcggattacggcattgttggcgacgccgtgaagatccttccggcgctgaccgcagctttagcgcgttgatccactctggcagggctgcattttggccctgccgctgacagggagctcttatgtccgaagatatctttgacgccatcatcgtcggtgcagggcttgccggtagcgttgccgcactggtgctcgcccgcgaaggtgcgcaagtgttagttatcgagcgtggcaattccgcaggtgccaagaacgtcaccggcgggcgtctctatgcccacagtctggaacacattattcctggtttcgccgactccgcccccgtagaacgcctgatcacccatgaaaaactcgcgtttatgacggaaaagagtgcgatgactatggactactgcaatggtgacgaaaccagcccatcccagcgttcttactccgttttgcgcagtaaatttgatgcctggctgatggagcaggccgaagaagcgggcgcgcagttaattaccgggatccgcgtcgataacctcgtacagcgcgatggcaaagtcgtcggtgtagaagccgatggcgatgtgattgaagcgaaaacggtgatccttgctgatggggtgaactccatccttgccgaaaaattggggatggcaaaacgcgtcaaaccgacggatgtggcggttggcgtgaaggaactgatcgagttaccgaagagcgttattgaagaccgttttcagttgcagggtaatcagggggcggcttgcctgtttgcgggaagtcccaccgatggcctgatgggcggcggcttcctttataccaatgaaaacaccctgagcctggggctggtttgtggtttgcatcatctgcatgacgcgaaaaaaagcgtgccgcaaatgctggaagatttcaaacagcatccggccgttgcaccgctgatcgcgggcggcaagctggtggaatattccgctcacgtagtgccggaagcaggcatcaacatgctgccggagttggttggtgacggcgtattgattgccggtgatgccgccggaatgtgtatgaacctcggttttaccattcgcggtatggatctggcgattgccgccggggaagccgcagcaaaaaccgtgcttagtgcgatgaaaagcgacgatttcagtaagcaaaaactggcggaatatcgtcagcatcttgagagtggtccgctgcgcgatatgcgtatgtaccagaaactaccggcgttccttgataacccacgcatgtttagcggctacccggagctggcggtgggtgtggcgcgtgacctgttcaccattgatggcagcgcgccggaactgatgcgcaagaaaatcctccgccacggcaagaaagtgggcttcatcaatctaatcaaggatggcatgaaaggagtgaccgttttatgacttctcccgtcaatgtggacgtcaaactgggcgtcaataaattcaatgtcgatgaagagcatccgcacattgttgtgaaggccgatgctgataaacaggcgctggagctgctggtgaaagcgtgccccgcaggtctgtacaagaagcaggatgacggcagtgtgcgcttcgattacgccggatgtctggagtgcggcacctgtcgcattctggggctggggagcgcgctggaacagtgggaatacccgcgcggcacctttggtgtggagttccgttacggctgatgttggtttgatacgtaacgccgcactgactctcattgcaaaaaacaggaataaccatgcaaccgtccagaaactttgacgatctcaaattctcctctattcaccgccgcattttgctgtggggaagcggtggtccgtttctggatggttatgtactggtaatgattggcgtggcgctggagcaactgacgccggcgctgaaactggacgctgactggattggcttgctgggcgcgggaacgctcgccgggctgttcgttggcacaagcctgtttggttatatttccgataaagtcggacggcgcaaaatgttcctcattgatatcatcgccatcggcgtgataagcgtggcgacgatgtttgttagttcccccgtcgaactgttggtgatgcgggtacttatcggcattgtcatcggtgcagattatcccatcgccaccagtatgatcaccgagttctccagtacccgtcagcgggcgttttccatcagctttattgccgcgatgtggtatgtcggcgcgacctgtgccgatctggtcggctactggctttatgatgtggaaggcggctggcgctggatgctgggtagcgcggcgatcccctgtttgttgattttgattggtcgattcgaactgcctgaatctccccgctggttattacgcaaagggcgagtaaaagagtgcgaagagatgatgatcaaactgtttggcgaaccggtggctttcgatgaagagcagccgcagcaaacccgttttcgcgatctgtttaatcgccgccattttccttttgttctgtttgttgccgccatctggacctgccaggtgatcccaatgttcgccatttacacctttggcccgcaaatcgttggtttgttgggattgggggttggcaaaaacgcggcactagggaatgtggtgattagcctgttctttatgctcggctgtattccgccgatgctgtggttaaacactgccggacggcgtccattgttgattggcagctttgccatgatgacgctggcgctggcggttttggggctaatcccggatatggggatctggctggtagtgatggcctttgcggtgtatgcctttttctctggcgggccgggtaatttgcagtggctctatcctaatgaactcttcccgacagatatccgcgcctctgccgtgggcgtgattatgtccttaagtcgtattggcaccattgttagcacctgggcactaccgatctttatcaataattacggtatcagtaacacgatgctaatgggggcgggtatcagcctgtttggcttgttgatttccgtagcgtttgccccggagactcgagggatgagtctggcgcagaccagcaatatgacgatccgcgggcagagaatggggtaaattgttcagatttctctcttttctgaatcaatattattgactataagccgcgtgaatatatgactacactttgtgggaaaacaaaggcgtaatcacgcgggctacctatgattcttataatttatgcgcatccgtatccgcatcattcccatgcgaataaacggatgcttgaacaggcaaggacgctggaaggcgtcgaaattcgctctctttatcaactctatcctgacttcaatatcgatattgccgccgagcaggaggcgctgtctcgcgccgatctgatcgtctggcagcatccgatgcagtggtacagcattcctccgctcctcaaactttggatcgataaagttttctcccacggctgggcttacggtcatggcggcacggcgctgcatggcaaacatttgctgtgggcggtgacgaccggcggcggggaaagccattttgaaattggtgcgcatccgggctttgatgtgctgagccagccgctacaggcgacggcaatctactgcgggctgaactggctgccaccgtttgccatgcactgcacctttatttgtgacgacgaaaccctcgaagggcaggcgcgtcactataagcaacgtctgctggaatggcaggaggcccatcatggataattaaggaatggcaggaggcccatcatggatagccatacgctgattcaggcgctgatttatctcggtagcgcagcgctgattgtacccattgcggtacgtcttggtctgggaagcgtacttggctacctgatcgccggctgcattattggcccgtgggggctgcgactggtgaccgatgccgaatctattctgcactttgccgagattggggtggtgctgatgctgtttattatcggcctcgaactcgatccacaaaggctgtggaagctgcgtgcggcagtgttcggctgtggcgcattgcagatggtgatttgcggcggcctgctggggctgttctgcatgttacttgggctgcgctggcaggtcgcggaattgatcggcatgacgctggcgctctcctctacggcgattgccatgcaggcgatgaatgaacgcaatctgatggtgacgcaaatgggtcgcagtgcctttgcggtgctgctgttccaggatatcgcggcgatcccgctggtggcgatgattccgctactggcaacgagcagtgccagcacgacgatgggcgcatttgctctcagcgcgttaaaagtggcgggtgcgctggtgctggtggtattgctggggcgctatgtcacgcgtccggcgctgcgttttgtagcccgctctggcttgcgggaagtgtttagtgccgtggcgttattcctcgtgtttggctttggtttgctgctggaagaggtcggcttgagcatggcgatgggcgcgtttctggcgggcgtactgctggcaagcagcgaataccgtcatgcgctggagagcgatatcgaaccatttaaaggtttgctgttggggctgtttttcatcggtgttggcatgagcatagactttggcacgctgcttgaaaacccattgcgcattgtcattttgctgctcggtttcctcatcatcaaaatcgccatgctgtggctgattgcccgaccgttgcaagtgccaaataaacagcgtcgttggtttgcggtgttgttagggcagggcagtgagtttgcctttgtggtatttggcgcggcgcagatggcgaatgtgctggagccggagtgggcgaaaagcctgaccctggcggtggcgctgagcatggcagcaacgccgattctgctggtgatcctcaatcgccttgagcaatcttctactgaggaagcgcgtgaagccgatgagatcgacgaagaacagccgcgcgtgattatcgccggattcggtcgttttgggcagattaccggacgtttactgctctccagcggggtgaaaatggtggtactcgatcacgatccggaccatatcgaaaccttgcgtaaatttggtatgaaagtgttttatggcgatgccacgcggatggatttactggaatctgccggagcggcgaaagcggaagtgctgattaacgccatcgacgatccgcaaaccaacctgcaactgacagagatggtgaaagaacatttcccgcatttgcagattattgcccgcgcccgcgatgtcgaccactacattcgtttgcgtcaggcaggcgttgaaaagccggagcgtgaaaccttcgaaggtgcgctgaaaaccgggcgtctggcactggaaagtttaggtctggggccgtatgaagcgcgagaacgtgccgatgtgttccgccgctttaatattcagatggtggaagagatggcaatggttgagaacgacaccaaagcccgcgcggcggtctataaacgcaccagcgcgatgttaagtgagatcattaccgaggaccgcgaacatctgagtttaattcaacgacatggctggcagggaaccgaagaaggtaaacataccggcaacatggcggatgaaccggaaacgaaacccagttcctaataaagagtgacgtaaatcacactttacagctaactgtttgtttttgtttcattgtaatgcggcgagtccagggagagagcgtggactcgccagcagaatataaaattttcctcaacatcatcctcgcaccagtcgacgacggtttacgctttacgtatagtggcgacaattttttttatcgggaaatctcaatgatcagtctgattgcggcgttagcggtagatcgcgttatcggcatggaaaacgccatgccgtggaacctgcctgccgatctcgcctggtttaaacgcaacaccttaaataaacccgtgattatgggccgccatacctgggaaagtatcggtcgtccgttgccaggacgcaaaaatattatcctcagcagtcaaccgggtacggacgatcgcgtaacgtgggtgaagagcgtggatgaagccatcgcggcgtgtggtgacgtaccagaaatcatggtgattggcggcggtcgcgtttatgaacagttcttgccaaaagcgcaaaaactgtatctgacgcatatcgacgcagaagtggaaggcgacacccatttcccggattacgagccggatgactgggaaagcgtattcagcgaattccacgatgctgatgcgcagaactctcacagctattgctttgagattctggagcggcggtaattttgtatagaatttacggctagcgccggatgcgacgccggtcgcgtcttatccggccttcctatatcaggctgtgtttaagacgccgccgcttcgcccaaatccttatgccggttgctcggctggacaaaatactgtttatcttcccagcgcaggcaggttaatgtaccaccccagcagcagccggtatccagcgcgtatataccttccggcgtacctttgccctccaggcttgcccagtgaccaaaggcgatgctgtattcttcagcgacagggccaggaatcgcaaaccacggtttcagtggggcaggggcctcttccgggctttctttgctgtacatatccagttgaccgttcgggaagcaaaaacgcatacgggtaaaagcgttggtgataaaacgcagtcttcccagcccccgcaattccggactccagttatttggcatatcgccgtacatggcatcaagaaagaagggataggagtcactgcttagcaccgcttctacatcgcgtgcgcactctttggcggtctgcagatcccactgcggcgtgatccctgcgtgggccatcaccagctttttctcttcgtcgatttgcagcagaggctggcgccgcagccagttaagcagctcgtcggcatccggcgcttccagcagcggtgtcaggcgatctttcggtttattgcggctgatcccggcaaataccgccagcagatgcagatcgtgattgcccagcaccagacgtacgctgtcgcctaaggatttcacatagcgcagaacatccaggctacccggcccgcgcgcgaccagatcgcccgtcagccagagggtatctttcccaggggtaaattctactttatgcagcaatgcgatcagttcatcgtaacaaccatgaacgtcgccaataaggtatgtcgccatattcttttaatgaatgagtgtgggaacggcgagtcggaatacgggaatgtcgatgctgaaagggacgccattttcatcgatcatttcgtagtgaccctgcatggtgcccagcggggtttcaatgattgcaccgctggtgtactggtactcttcgccaggcgcgataagtggctggacgccaaccactccttcgccctggacttcggtttcacggccattgccattggtgatcagccagtaacgccccaacaactgcactggcgctcgccccagattgcgtatggttacggtataagcaaaaacgtaacgttcattatcaggactagattgagcctcaatgtagacgctttgaacctgaatacacactcgggggctattgatcatcgttaactctcctgcaaaggcgcgttctccgccagatagttcgccatctggcaatattgcgcgacagagatattttccgctcgcatcgccgggtcgatccccattcccgttaacacctcgacgctaaacaggttgccgaggctgttacgaatggttttacgacgctggttaaaggcttcggtggtgatgcggctcaacacacgaacatctttaaccgggtgaggcatcgttgcatgaggaaccaggcgcacgacggcggaatccactttgggtggtggtgtaaaggcactcggcggtacttccagtaccgggatcacattgcaatagtattgcgccatgacgcttaatcgaccatacgctttgctgttcggtcctgcaaccagacgattcaccacctctttttgcaacataaagtgcatgtcggcaatggcatcagtatagctaaacagatggaacatcaacggcgtggagatgttataaggcaggttgccgaaaacacgcagcggctgacccattttctcggccagttcaccaaagttaaaggtcatcgcatcctgctgataaatcgtcagtttcgggcctaagaatggatgcgtttgcagacgtgccgccagatcgcggtcaagttcgatgaccgtcagctggtccagacgttcgccgaccggttcggtcaatgccgccagaccggggccgatttcgaccatcgcctggcccttttgcgggttaatggcagacacaatactgtcgatcacgaactgatcgttgagaaagttttgcccgaagcgtttacgggctaagtggccctggtggactcgattattcattgggtgttaacaatcattttgatggcgagattaagcgccgtaataaaactgccggcatcggctttgccacgtcccgccagttcaagcgcggtgccgtggtccacacttgtgcgaataaagggcaggcccagcgtaatgttcacaccgcgcccgaagccctggtattttagcacgggaagaccctgatcgtggtacatcgccagcacggcgtcggcgttatcaagatatttcggctgaaacagggtatcggcaggcagcggcccgttgagtttcatcccctgcgcccgcagctcattgagcaccggaataatggtgtctatctcttccgtacccatatgaccgccttcgcccgcgtgcggattcagcccgcagaccagaatgcgcggttcggcaataccaaatttggtccgcaaatcgtgatgcaaaatagcaatcacttcgtgcaaaagtgcaggggtgatagcgtctgcgatatcgcgcagcggtaaatgcgtcgttgccagcgccacgcgaagttcttcggtcgccagcatcatcaccacctttttcgcctggctacgctcttcgaaaaactcggtatgaccggtaaaaggaatgccagcgtcgttaataacgcctttatgcaccggacctgtgatcagcgcggcaaattcgccgttcagacaaccatcgcacgctcgcgccagcgtttccaccacataatgcccattttcaaccgctaactgccccgcagtgacaggtgcacgtagcgcgacaggaagtagcgttaatgtgcccgcagtttgcggttgtgcaggggagttgggggaataagggcggagggtgagcggcaaaccgagcatcgctgcccggttggtaaggagagtggcatcggcacaaacaaccagttcgaccggccactcacgctgtgcaagctggacaactaagtccgggccaatcccggcgggctcgccgggagtgatcacaacacgttgggttttaaccattagttgctcaggattttaacgtaggcgctggcacgttgttcctgcatccagcttgctgcttcttcgctgaacttacggttcatcagcatgcggtatgcacgatctttctgcgcagcgtcggttttatcgacattacgggtatccagcagttcgattaaatgccagccgaaactagagtgaaccggtgcactcatttgacctttgttcaggcgagtcagggcgtcacggaaggccggatcgaaaatatctggtgtagcccagccgagatcgccgccctggttagcagagcctggatcctgagagaactctttcgctgcggcagcaaaagtcgttttaccactcttgatatcagcagcaatctgttccagtttcacacgggcctgttcgtcagtcatgatcgggctcggtttcagcagaatatggcgagcatgaacttcggtcacgctgatatttttgctttcgccgcgcaggtcgttaactttcagaatatggaagccaacgccggaacgaatcgggccaacaatgtcgcctttcttcgcggtgcttaatgcctgggcgaagatcccgggcaactcctgaatacggccccagcccatctggccgccgttcagcgcctgctggtcggcagaatgagcaatcgccagcttaccgaaatcagcgccgttacgcgcctgatcgacaatggcgcgcgcctggctttccgcttcgttcacctgatcagaggtcgggttttccggcagcgggatcaggatgtggctcaggttcagctcagtgctggcgtcgttttggttacccacctgctgcgccagggattcgacttcctgcggcaggatggtgatgcgacgacgcacctcgttgttacgcacttcagagataatcatctctttgcggatctggttacgataggtgttgtagttcagtccatcgtaagccagacggctgcgcatctgatccagcgtcatgttgttctgtttcgcgatgttagcaatcgcctgatccagctgctcatcggagattttcactcccattttctgccccatctgcaggatgatttgatccatgatcaaacgttccatgatttggtggcgcagcgtcgcgtcatcaggaagttgctgccttgcctgagcagcgttcagttttacgctctgcattaatccatcaacgtcgctttccagcacgacgccgttattgacgacggctgcgactttatcgactacctggggggcagcgaaactggtattcgcgatcatggcgataccgagaagcagcgttttccagttcttcatactttttccatttcaattaaccgcactgcggattacgtggtaaatcaacaaatcacaaagtgttttgatacggcagaatgttgctacgcagcatctcttgcgtacccagaccgtagttggagctcaggccgcgaagttcgatgttaaagccgattgcgttgtcatataccgcatgttgtttatcgttatcccaaccgttcagcttccgctcgtaaccgacgcgaattgcatagcagcaggagctgtattgcacacctaacatagagtcggcttgcttgttagcattggtgtcgtagtagtaggccccaacaatggaccaacgatcggcaattggccagctggcgacagcacctacctggctaataccattcttatattgctcagcagtggaatagtacttaggcagcgtagcctgaatatattccgggctggcgtaacggtaattcagctgtaccagacggtcttcatcccgacggtattcaatgctggagttactggtcgctacgttatccagacgtgtatcgtactgaatcccgccacgcaatccccaacgctcggagatacgccagtaagtatcgcctgcccacaccagactacccgttttgtcgtcattctcccatgttatgttgtcatcgccagtgcgagactccgtgaaatagtagatttgaccaacggaaatattaaaacgttcaacggcagcatcatcatatatgcgagatgtgacaccggtcgtcacctggttagcggaggcaatacggtcaagaccgccgtaagtccggtcccggaacaggccagagtagtcagattgcagcagagagctgtcgtagttatagatgtcgctctgatcgcgatacggcacgtacaaatactgcgcgcgcggttccagcgtttgggtataacccggagccagcatttccatatcgcgttcaaagaccattttgccgtcaactttgaattgcggcattacgcggttaacggattcgtccagcttggtcgtgtttctggagttataccagtcaagattggtttgctgataatgggttgccagcaacttcgcttcggtattgatgctgccccagttattagagagcggcaaattgatggtcggttccaggtgaacacgggttgcttcaggcatgtcgtctctggtgttaacaaagtgcactgcctggccgtaaatacgcgtatcaaacggaccaacatcattctggtagtaattaacgtctaactgcggctctgcgctgtagctactggtgttctgttcgctgaaaacctggaactgcttggtactaacggtggcattgaagttttgcaccgcatagccaacgctgaatttttgcgttgcgtagccgtcagtactggaaccgtacttgttatcgaaatcattgaagtagctaggatcgctgaccttggtgtagtcgacgttgaaacgccacacctgatccatgaccccggagtggttccagtagaataaccaacgacgactactgtcatcgttcgggtgttcatcttcatagactttatcactaggcagatagtccagttccatcaagccagcgcccgcctgggagaggtagcggaattcgttctcccacatgatgttgccacgacgatgcatataatgcggcgtgatggtggcatccatatttggcgcgatgttccagtaatatggcaggtagaactcaaagtagttggtggtggtgtacttggcgttcgggatcaagaaaccagagcgacgtttgtcacccaccggcaactgcaaataggggctataaaagatcggtaccggacccaccttaaagcgggcgttccagatctccgcaacttgttcttcgcggtcatgaataatttcgctacctaccacgctccaggtgtcagaacccggcagacaggaggtaaagctaccgttatccagaatggtatagcggttttcgccacgttgtttcatcaggtccgctttaccgcgaccctggcgacccaccatctggtaatcaccttcccagacgttggtatctttggtgttcagattcgcccagcctttcggccctttgaggatcacctggttatcgtcgtaatggacattaccgagcgcatcaacggtacgtaccggctccggttgtcctggtgcctctttttgatggagctgcacttcgtcggcctgcagacggctgttaccctgcatgatatccacgctgccagtaaacacggcgtcatccgggtagtcccctttcgcgtggtcagcattgatagtcacgggtaagtcattggtatcgccctgtaccagaggacggtcatagcttggcacgcccaacatgcactgactggcgaggtcggctgccagtccctgttgactataaagggcggtggcaatcatggtggccaggagagtggggatacgttttttcatacgttgattttattgttccatcatcggtaacgttgcgcgtgacaaacggtcagagactaacgtactcgtcatctctacgctagtgttaatcctgtccgaatagcgtcagtggtgttaggcacggcattgaatgacaggtatgataatgcaaattataggcgatgtcccacaattgaccgcagccggaaaacggtaaaagcacctttatattgtgggagatagccctgatatccgtgtgtcgatttggggaatatatgcagtattggggaaaaatcattggcgtggccgtggccttactgatgggcggcggcttttggggcgtagtgttaggcctgttaattggccatatgtttgataaagcccgtagccgtaaaatggcgtggttcgccaaccagcgtgagcgtcaggcgctgttttttgccaccacttttgaagtgatggggcatttaaccaaatccaaaggtcgcgtcacggaggctgatattcatatcgccagccagttgatggaccgaatgaatcttcatggcgcttcccgtactgcggcgcaaaatgcgttccgggtgggaaaaagtgacaattacccgctgcgcgaaaagatgcgccagtttcgcagtgtctgctttggtcgttttgacttaattcgtatgtttctggagatccagattcaggcggcgtttgctgatggtagtctgcacccgaatgaacgggcggtgctgtatgtcattgcagaagaattagggatctcccgcgctcagtttgaccagtttttgcgcatgatgcagggcggtgcacagtttggcggcggttatcagcagcaaactggcggtggtaactggcagcaagcgcagcgtggcccaacgctggaagatgcctgtaatgtgctgggcgtgaagccgacggatgatgcgaccaccatcaaacgtgcctaccgtaagctgatgagtgaacaccatcccgataagctggtggcgaaaggtttgccgcctgagatgatggagatggcgaagcagaaagcgcaggaaattcagcaggcatatgagctgataaagcagcagaaagggtttaaatgaccctgtaaatgatgctgagtaactgcccacgattaaaggtggccgccctggcggtcacttctttgagaaaaggcgtttactcagaatggtggacaggctcaatgcacgatttacgggaggggttctgtaggttttatcgcgttgaccctgcttaaggttgagagctttacgacgagcggaattatatttttacgtcttaaaaataaaaaacacatacctgaatgagcgatttttgaaagtatatttattcagaacgcgcatcatgagtttttaactcaatgcgaggctattaccatgaaagtaagtgttccaggcatgccggttacacttttaaatatgagcaagaacgatatttataagatggtgagcggggacaagatggacgtgaagatgaatatctttcaacgcttgtgggagacgttacgccatctgttctggagtgataaacagactgaggcttataaacttctgttcaatttcgtgaataaccagactggcaacatcaacgccagtgaatactttactggggctatcaacgagaatgagagagaaaagtttatcaatagcctggaattattcaataaacttaaaacatgcgcaaaaaatccggatgagttggtcgcaaagggcaatatgcgctgggtcgcccagaccttcggggatatcgagttaagtgtcactttttcattgaaaagaataagatatgtactcagacgttgcagctgcataagggccaaggtaacttgggcgttgatcttagaaaggcttaccttcccggcgttgacatgagggattgttaccttggtaaaaaaacaatgaaaggtagcaatgatatcctttatgagagacctgggtggaatgctaacctgggcgtgctaccccggacggtgctaccccggacggtgctaacccggacggtgctaacctggacggtgctaccgtgaacggtgctacctccttatatgatgaggtaattattattaataaaatcccccccaaaaaaattgatactaaaggagttgctactgaagaagttgctactaaaaaagtactgctgaacaaattactgacaacgcaattattgaatgagccagaataagctaaggttgaaggggctggaacgccccttcaaccttagcagtagcgtgggatgatttcacaattagaaagacctgcatgatgagctagagaagaggctagtgacgcaaggcgtcgtgcaggacacggatcaccgagatgggcatcgccaaccagactgctaattagcccatgaataacaatcagaaaggaccataacagacccgttaaaatgaaatataagagacggtcaacgggtgaagaaaaagttcaaaaattcgctgtggagcaggaagggaattaccgaatggaaagcgtagccacacgcaacaactgaaagcagtttggcagaaacaaaaaatccccggactcggggatttatgtacaagaggcagcccttaggatgagggtataaacgtacaggaaaggttaaaaatccgctggcgctttaaacgtcatactattgccatacgccggatgggtaatcgtcaacatctctgcatgtagcaacaaacgtggtgccatcgctctcgcttctggacttgcataaaaacgatcgccgagaatcggatgacccagcgccagcatatgcacacgcaattgatggctacgcccggtaatcggttttaacaccactcttgccgtgttatccgccgcatactccaccacttcatattccgtctgcgcaggtttacccgtttcgtaacagactttctgtttcgggcggtttggccagtcgcaaatcagcggcagatccaccagaccttctgcgggggatggatgcccccagacgcgggccacatactgctttttcggctcgcgctcgcggaactggcgttttaactcccgctccgcggctttggtcagcgccactacaatcacgccgctggtagccatatccagacgatgcacgctttctgcctgcggataatcacgctgaatgcgcgtcatcacgctgtctttgtgctcttccagacgacccggcacactcaacaaaccgctcggcttgttgaccaccataatatggtcatcctgatacaggataaccaaccagggttcctgcggtggattgtagttttccatccccattttcggctccgttactgatgcgttacaacgatcaaacgcagggcatccagacgccaacctgcctgatccaggctttccattacctgctgacggttgctctcaatggcggtcagttcgtcgtcacgaatgttcgggttcactgcacgcagagcttccagacgagacagctcggcagacagtttttcgtcggcttcgttacgcgctgcatcaatcaatgcacgggcagatttctcgatctgcgattcacccagttgaaggatagcgtgaacatcctgctgcacggcgttaaccagtttgctgccggtgtgacggttaaccgcgttaagctggcggttaaaggtttcaaactctacctgcgccgccaggttgttgccgtttttatccagcagcatacgtaccggcgtcggtggcaggaagcggttgagctgcaactgcttcggagcctgggcttcaaccacataaatcagttccaccaacagcgtacctaccggcaacgctttgttttttaacagactaatcgtgctgctaccggtatcgccagaaaggatcagatccagaccgttgcggatcagcggatgctcccaggtaataaactgtgcatcttcacgcgccagcgccacttcacgatcaaaggtgatggtgatgccatcttcgctcaggccagggaagtccggcaccagcatatgatcggacggcgtcagcacgatcatgttgtcgccgcgatcgtcctgattgataccgataatatcgaacaggttcatggcgaaggcgatcaggttggtatcgtcatcctgctcttcaatgctttctgccagtgcctgggctttttcgccaccgttggagtggatttccagcaggcggtcacgaccctgttccagctgtgctttcagcgtttcatgttgctcgcggcagtttttgatcagatcgtcaaagccttcggtttgatccggactagccagatagttaatcagatcgttgtatacgctatcgtaaatagtgcgtccggtcgggcaggtgtgctcaaatgcatccagaccttcgtgataccagcgcaccagcacgctctgagcggttttctccagataaggcacatggatctgaatatcgtgcgcctggccgatacgatccagacgaccaatacgctgctccagtagatccgggttgaatggcaggtcaaacatcaccatgtggctggcgaactggaagttacgtccttcagaaccgatttcactgcacagcagtacctgtgcgccggtgtcttcttcggcaaaccaggcggcagcgcggtcacgttcgataatgctcataccttcgtggaacaccgcagcgcgaataccttcacgttcgcgcagtacctgctccagttgcagcgcagtggcagctttggcgcagatcaccagcactttctgagagcgatggctggtcaggtagcccatcagccactcaacgcgcggatcgaagttccaccaggtggcgttatcaccttcaaattcctgataaatacgctccgggtagagcatatcgcgagcacgatcttccgcacttttacgtgcgcccataatgccggagactttaatagccgtctgatactgcgtcggtagcggcagcttaatggtgtgcagctcgcgtttcgggaatcctttcacaccgttacgcgtgttacggaacagcacgcggctggtgccgtggcgatccatcagcatgctaaccagctcctgacgggcgctctgggcatcttcgctgtcgctgtttgctgcctgcaacagcggctcgatatcctgctcgccgatcatctcgccgagcatgttcagttcgtcattgctcagtttgttacctgccagcagcatggcaacggcgtccgcaaccggacgataatttttctgctcttcaacgaactgcgcaaaatcgtggaaacggttcgggtccagcagacgcagacgggcgaagtggctttccatccccagctgttccggggtcgcggtcagcagcagaacgcccggcacgtgctctgccagttgttcaatggcctgatattcacggcttggcgcatcttcgctccacaccaggtgatgcgcttcatcgaccaccagcaggtcccattcggcttcacagagatgttccaggcgctgtttgctacgacgggcaaaatccaggctgcaaatcaccagctgttcggtgtcaaacgggttgtaagcatcgtgctgagcttcggcataacgctcatcatcaaatagcgcaaagcgcaggttgaaacggcgcagcatttctaccagccactgatgctgtaaggtttccgggacgataattagcacacgttcagcagcgccagagagcagttgctgatgcaggatcatcccggcttcaatggttttccctaaacccacttcgtcagccagcaggacgcgcggcgcgtggcggcgaccaacatcatgagcgatgttgagctgatgcgggatcaggctggtacgctgaccgcgcaggccgctgtacggcatacggaactgttcgctggaatatttacgcgcgcgataacgcagcgcaaagcggtccatacggtcaatctgcccggcaaacagacggtcctgcggtttgctgaacaccagtttgctatcaaggaaaacttcacgcagggctacgccggactcttcagtatccaggcgagtaccgatataggtcagcaagccattttcttcttttacttcttcgacttgcatctgccagccgtcatggctggtaatggtatcaccagggttgaacatcacgcgggtcacgggggaatcactgcgtgcgtacagacggttttcaccagtagatgggaaaagtaaagtgacagttcgcgcatccaccgcgacaacggttccaagtcccaattcgctttctgtatcgctgatccagcgttgaccaagtgtaaaaggcatatgtgttcggctctatatctttaattgcaggcaataaccacccgctaccgtgcttatgaggtagtggtgttattcaggtccaggaatggaaagggcgctatggtactggatggcaaagcattcgtcacgcatcaaaatggtatctggcgaactcttttttttgctcaaaatagcccaagttgcccggtcataagtgtagcaaaattatcctcaataaaagggagtattccctccgccacgggttgtagctggcgggtcagatagtgttcgtaatccagtggactacgttggtagtccagcggctccgggccgttggtggtccatacgtacttaatggtgccgcgattctgatattgcaaggggcgaccacgcttttggttttcttcatcggcaaggcgagcggcgcgtacatgaggcggcacattacgctgatactcgctcagcggacggcgaaggcgtttacggtaaaccagtcgcgcatccagttcacccgccatcagtttgtcgatggtttcgcgtacatattcctgatatggctcgttgcggaagatgcgcaggtatagctcctgctgaaactgctgggccagcggcgtccagtcggtgcgcacggtttccagccctttaaacaccatccgctgcttgtcgccctcctgaatcagtccggcataacgctttttactgccggtatcggctccgcgaatggttggcatcagaaaacggcagaaatgggtttcatactccagttctaatgcgctggtcagccgttgtttttgcagcgtttccgcccaccaggcgttaacgtgctgcaccagtgcacgaccgattttcgccgcttcttcttcgctatgtgcgcctttcagccagacaaacgtactgtcggtatcgccgtagataacgtcgtagccctgtgcttcaatcaacgctttggtttgccgcatgatctgatgaccacgcatggtgatgctgcttgccagccgcggatcgaagaagcggcaggcggtggtgccgagcacgccataaaaggcattcatgatgattttcagcgcctggctcagcggtttgttaccctggcgtttggcttcatcgcgcccgtgccagatgttagtcacaatctccggcaggcaatgtttttctcggctgaaccaggcatcgagaaaaccttcggtactgtgctctggatcaggctgcgccatgccttccaccagcccgacgggatcaatcagaaaggtgcggatgatgctcgggtacaggcttttatagtccagcaccagcacactatcataaagccctggccgactatccatcacgtagccgccagggctggcgtgcggcggcacttcgccgagattaggcgcgacataaccagcgcgatgcattcgcggaaaatagagatgaccaaatgccgccacgctaccgccgtgtcggtccaccggcaggccgttcaccgttgcccgttcgagtaaaaatggcatgatttcagttttgtggaagatctgcgtcaccagctcgcaatctttcaggttataagttgccagcgcaggtttatcttcggcgaaacggcggtcaatttcgtccattcgatcccacgggttatcgatagattttccttcgcctaatagctcctgagcgacagtttccaggctgaaactagagaaattccagaacgcggatttcagcgcctcgataccgtcgataattagccgacctttagcctgggcaaaaaagacgccgtttttaaagccgtgctcgcgccactccagctcgctattatcgcgcccaagacgcagcggaagacggtaacgctcggcatgtttttgcagcattcgcagatcgaactgcaccacgttccaaccgatgatcacatcaggatcgtagttggcaaaccaggcgttgagtttttccagcaactgcgggcggctggcgacgtattccagttcgaaatcaaggctggaggcgtcgccattctccggccccagcatataaacgatgcgctgcccgcagccttccaggccgatgcagtacagctcaccgtggcgggtggtttcaatatctatagaaacccacttgagcggcggacgatagtcgggatgcggtttcagacgggcattaacgatagtgccattgtgcatatcaccctcgacccacaccggactggtgataaaccgctccatcagatagcgttctggcggacgcacatcggcctcgtagacggtaacgccaccttcacgcaggcgcttttcgtaattcatcaattggcgatgggcgcgacagtaaaggccatacaccggctggcggtgaaaatcctttaacgccagcggtgtcaggcgaaagccttgttcaccctgcaaaatatgctgagcgcggggaacctgatcggcgggaataaacgccacggactcttgcggtgcaagcgtaacctgcaacggcccgttgtccgtcgccagccagaaggagacttctgtcccttgcggggtgtcccgccagtgtcgggttaagataaaacctgcctgcgccacgctgaaaatccatcaaaaaaccaggcttgagtatagcctggtttcgtttgattggctgtggttttatacagtcattactgcccgtaatatgccttcgcgccatgcttacgcagatagtgtttatccagcagcgtttgctgcatatccggtaactgcggcgctaactgacggcagaatatccccatataagcgacctcttccagcacgatggcgttatgcaccgcatcttcggcatttttgccccatgcaaacgggccgtgggaatggaccagaacgccgggcatttgcgctgcatcgataccctgtttttcaaaggtttctacgatgacgttaccggtttcccactcatattcgccgttgatttctgcgtcggtcattttgcgggtgcagggaatggtgccgtagaaatagtcggcgtgggtggtgccggttgctggaatgctctgacccgcctgcgcccagatggtggcgtggcggctgtgcgtatgcacaatgccgccaatggaggggaatgcctgatagagcagccggtgagttggcgtgtcggaggagggctttttcgtaccttcaaccacttcaccggtttcgatgctaaccacgaccatatcgtcagcggtcatgacgctgtaatcgacgccggaaggtttgatcacaaagacgccgcgctcgcgatcaacggcgctgacgttgccccatgtgagcgtgaccaggttgtgttttggcagcgccaggttggcttctaatacctggcgtttgagatcttctaacatgttgactccttcgtgccggatgcgctttgcttatccggcctacaaaatcgcagcgtgtaggcctgataagacgcgccagcgtcgcatcaggcgttgaatgccggatgcgctttgcttatccggcctacaaaatcgcagcgcgtaggcctgataagacgcgccagcgtcgcatcaggcgttgaatgccggatgcgctttgcttatccggcctacaaaatcgcagcgtgtaggccagataagacgcgtcagcgtcgcatcaggcgttacataccggatgcggctacttagcgacgaaacccgtaatacacttcgttccagcgcagcgcgtctttaaacgctggcaggcgtgtgtcgttatcaatcaccgtgatttcaatgtcgtgcatctcggcgaattggcgcatatcgttgaggttcagtgcatggctgaagacggtatggtgcgcgccaccagcgaggatccacgcttcggaagcagttggcagatccggttgcgctttccacagcgcattcgccaccggcagtttcggcagggagtgcggtgttttcaccgtgtcgatgcagttaaccagtagacggtaacgatcgccgagatcaatcaagctggcgacaatcgctgggccggtttgggtattgaagatcaggcgggcaggatcgtccttaccaccaataccgagatgctgaacgtcgaggatcggtttctcttctgcggcgatgctcgggcagacttccagcatatgggagccgagcaccaggtcattacctttctcgaagtgataggtgtagtcctccataaaggaggtgccgccctgcagaccggtactcatcaccttcatgatgcgaagcagggcggcagttttccagtcgccttcgcccgcaaagccgtaaccctgctgcatcagacgctgtacggccagaccaggaagctgtttcagaccgtgcaaatcttcaaaggtggtggtgaacgcgtggaagccaccttgttccaggaaacgcttcatccccagctcaatacgcgccgcttccagcacgttctgtcgttttttgccgtggatttgtgtggcaggcgtcatggtgtagcagctttcgtactcatcgaccagcgcgttaacatcgccgtcgctgatggagttcaccacctgcaccagatcgccaaccgcccaggtattgacggagaaaccgaacttgatctgtgcggcaactttatcgccatcggtgaccgccacttcacgcatgttatcgccaaatcggcagactttcagatgacgggtatcctgtttagagaccgcctgacgcatccaggagccgatacgctcatgggcttgtttatcctgccagtgaccggtaaccacggcatgttgctgacgcatacgcgcgccaatgaagccgaactcgcgaccgccatgtgcagtctggttcaggttcataaagtccatatcgatactgtcccacggcagcgccgcgttgaactgggtgtggaattgcagcaacggtttgttgagcatggtcaggccgttgatccacattttggccggggagaaggtgtgcagccacaccaccagaccagcgcaacgatcgtcgtaattcgcgtcgcggcaaatagcggtgatttcatccggcgtggtgcccagcggtttcaacaccagtttgcagggcagtttcgcttccgtattcagcgcattaacgacgtgctcggcatgttgggtgacctgacgcagggtttccgggccatacagatgctggctgccaatgacaaaccacacttcataattatcaaaaatcgtcattatcgtgtccttatagagtcgcaacggcctgggcagcctgtgccggggcggaagttggaagatagtgttgttcggcgctcatcgcccattgctgatagcggcgataaagctgttcaaagcgttgtgcctgctcgctgcacggttgcagggttttctctaccgcactggccattttttgctgagcacttgggatgtctgcgtgcactttcgcggcgacggcagcaaaaatcgccgcaccgagcgcacagcactggtcagaggcaacaatttgcagcgggcgattcagcacgtcgcagcaggcctgcataatgacctggtttttccgcgcgatgccgcccagtgccatcacgttattaacggcgatcccctgatcggtaaagcactccatgattgcgcgtgcgccaaaggcggtggcagcaatcaaaccgccgaacagcagcggagcgtcggtagcgaggttaagatcggtaatcacccctttcaggcgttggttagcgttcggtgtgcggcggccgttaaaccagtcgagcaccaccggcaggtgatccagagacggatttttggcccatgcttcggtcagcgccggaagcagttgtttctggctggcgttgatttgcgttttcagttccggatgctgggcggcaagctgttccagcggccagccgagtacgcgaccaaaccaggcgtagatatcaccaaacgcgctttggcctgcttccagaccgataaatccaggcaccacgctgccatcaacctgaccgcaaatacctttaactgcccgctcgccaacgctctgtttgtcggcaatcagaatgtcgcaggtggaagtaccgataacttttaccagtgcgttaggctgtgcgcctgcgccaactgcgcccatatggcagtcaaacgcgccgccggaaatcaccacgctttcaggcaggccgagacgctgcgcccattccgggcataaggtgcccaccggaatatcggcagtccaagtgtcagtgaacagcggggaaggcaaatggcgattgaggatcgggtccagctcatcaaagaaactggctggcggcaggccgccccagctttcgtgccacagagatttatgcccggcgctgcaacgtccgcgacgaatatcctgcgggcgggtggtaccggaaagcagagctggcacccagtcgcacagctcaatccagcttgcggcagattgcgccacggcgctgtcctggcgagtcacatgcaggatttttgcccagaaccattcgctggaataaataccaccaatgtagcgggagtagtcaacgttgcccggcgcgtggcacaaacgggtaatctcttccgcttcttcaaccgcagtgtggtctttccacaatacgaacatcgcgttcgggttttcggcaaactccgggcgcagcgccagcacgtttccgtcggcatcaatcggtgcgggcgtgctgccggtactgtcaacgccaatcccgaccacagctgcgcgctgttcgacgctaagctctgcaagcacggttttcagtgccgcttccatactctcaatgtagtcacgcggatgatgacggaactggttattcggggcatcacaaaattgccctttctgccaacggggataccactctacgctggtggcgatctcttcaccggtagcgcagtccaccgccaaagctcgcacagaatcactgccaaaatcgaggccaattgcaatcgccatcgtttcactccatccaaaaaaacgggtatggagaaacagtagagagttgcgataaaaagcgtcaggtaggatccgctaatcttatggataaaaatgctatggcatagcaaagtgtgacgccgtgcaaataatcaatgtggacttttctgccgtgattatagacacttttgttacgcgtttttgtcatggctttggtcccgctttgttacagaatgcttttaataagcggggttaccggttgggttagcgagaagagccagtaaaagacgcagtgacggcaatgtctgatgcaatatggacaattggtttcttctctgaatggtgggagtatgaaaagtatggctgaagcgcaaaatgatcccctgctgccgggatacagctttaacgcccatctggtggcgggtttaacgccgattgaggccaacggttatctcgatttttttatcgaccgaccgctgggaatgaaaggttatattctcaatctcaccattcgcggtcagggggtggtgaaaaatcagggacgagaatttgtctgccgaccgggtgatattttgctgttcccgccaggagagattcatcactacggtcgtcatccggaggctcgcgaatggtatcaccagtgggtttactttcgtccgcgcgcctactggcatgaatggcttaactggccgagtatatttgccaatacgggtttctttcgcccggatgaagcgcaccagccgcatttcagcgacctgtttgggcaaatcattaacgccgggcaaggggaagggcgctatagcgagctgctggcgataaatctgcttgagcaattgttactgcggcgcatggaagcgattaacgagagcctccatccaccgatggataatcgggtacgcgaggcttgtcagtacatcagcgatcacctggcagacagcaattttgatatcgccagcgtcgcacagcatgtttgcttgagcccgagccgtctgagtcatcttttccgccagcagttagggattagcgtcttaagctggcgcgaggaccaacgcattagtcaggcgaagctgcttttgagcactacccggatgcctatcgccaccgtcggtcgcaatgttggttttgacgatcaactctatttcagccgagtatttaaaaaatgcaccggggccagcccgagcgagtttcgtgccggttgtgaagaaaaagtgaatgatgtagccgtcaagttgagttaattggtaacgaatcagacaattgacggcttgacggagtagcatagggtttgcagaatccctgcttcgtccatttgacaggcacattatgcaagcattgctggaacactttattacccaatccaccgtgtatagtttgatggcggtggtgttggtggcctttctggagagcctggcgctggtcggtttgattctacccggtacggtgctgatggcggggctgggagcgctgattggcagcggcgagttaagtttctggcacgcctggctggcagggattattggctgcttgatgggcgactggatttctttctggctgggttggcgttttaaaaagccgttgcatcgctggagttttctgaagaaaaacaaagcactacttgataaaactgaacatgcgttgcatcaacacagcatgttcaccattctggtcggtcgttttgttggcccgacgcgtccgctggtgccaatggtggcgggaatgctggatctgccggtggctaaatttattacgccgaatattatcggctgcctgctgtggccgccgttttacttcctgccagggattctggcgggcgcggcgatcgatattcctgccggaatgcagagcggtgagtttaaatggttgctgctggcaacagcggtgtttttgtgggttggtggctggctgtgctggcggttatggcgcagcggtaaagcgactgaccgtttgagtcattatttgtcccgcggtcgtttgttgtggctgacgccgttgatttctgccatcggcgtggtggcgctggtggtgttaattcgccacccgttgatgccggtgtatatcgatattttgcgtaaagtggttggggtttaagagatagtcttgtgcgggttgcctgatgcgacgcttgccgcgtcttatcaggcctacaaaacgcactacccgtaggtcggataaggcgttcacgccgcatccgacagtgcatattaacccgtaatccccaatagtgcgctagcactcgccttaccgctcaacaactcattggtcataccctgccaggcgatgcgcccgtcggcgactactacgctgcgcgtggcgatccgcgccgcatcttccacgctgtggctcaccatcaatagcgtcattttttgctgctggcagctcgtgctcaccagcgtcaacatctcctgacgtaacgccggatcgagcgcagagaacggttcatcgagcaataaaatcggctgttcgcgtaccagacaacgcgctaacgccactcgctgtcgctgaccgccggaaagctcgcccggtaaccgcgccattaaattatcaatccccatctggcgggcgatagcgtgcattttcccctgctgtaccgcgttcagtttcaatcccggatttagccccagcccgatgttctgtgcgaccgtcaggtggctgaacaggttgttctcctgaaacagcatgctcaccggacggcgactcggcggcatagttgtgtgatctacgccatcgatagtcaggctaccgctggctggcgtcagaaaaccggcgatcaaattcagcagggtacttttacccgcgccgcttggcccgaggatcgccacctgctcgccgcgttccaccgttaagctaaaacgcatcggcaaatggtggtaaagccaggtgatatcagtcagttttaacatttcgccccggtagtttttcaatcacggtaaacagcagaaaacagagcagcagcagaattaacgcggtgaccgcaccgtcctggctgcgataggagccaatttgctggtagagataaaacggcagggtgcggaaatcatcgttaccgaacaacgccaccacgccaaaatcaccaatgctcagcacgcatgcaaaggccagcgcctgcgccagtggacgtttcagggcgcgcagctccaccacttttaagcgactccagccttcaatccccaggctctgacataacatgctgtagcgggcggtgatatcgcgcatcgggttttccagcactttcagcgcataagggatcgccattaacgcattggtgaaaatcacaatgccgtcagcagattgtggcaggccgatagtgttgttgagcagtaaaaagaagccggtagccagcacaatccccggcatggcgaggatcaacatgccgctcatctccagcacctgacccgccagcattttctgccgcgcccgcagttcgcgactgctccatagcagcatcatggtcagcactacgcacaatacacctgccgccagcgcaatacgcaagctggtccacagcgcctgccacagcaccggttgtgccagcacttccggcaactggcgatttaccccatcgacgatcaccgccagtaacggtggcagcaacagcagcagcgccagcacaattaacaccgtgtcgcaaatgcggctatgcagacgatcgtccgggtcgcgccagccttgcagcagcgtggtgccgggcgcaatggccttactcaatcgctgactcaacagcaccagcccgaggcagcacaccatctggagcagcgccagcattgccgcgcgggcaggatcgtagtcgtaactcagcgcctgatagattgccagctcgatagtggtcgcctgcggaccgccccccaggcttagcacggtggcgaagctggcgaaacagagcataaagataagcgcagcaaccggcgggatttgtcgccgtaaccacggccattcgacgaagcggaaaaaatgccagctacgcatcccaagctgggcggcaagttgacgctgttcgccggggatgttttccagtgcctggagtaataagcggctcgccatcggcagattaaaaaacacatgggccagcaaaataccttgcaggccgtaggggctaaaggtccactccagaccgaggctttggcagagtgttgccagccagccctggcgaccatagacgctaagaatgccgaaaacagcgaccaacaccgggaggatcaaggtcattgcacacagacgcaacagcgccagccgacccggaaagcgcctgcgatagagcgcgcgggcgaggaatatcgcgggtatgacagagagcagtgcgctgagaaacgcctgccagaaggagaagcgcaccacatgccacagatagctgtcctgccagactgccacccagtcatcctgcggcgcgttccaccacagggcgagaaacgccgccagcgcaaccgctaccaccagcgtggtggcgcttacacctggaattaaccagccgggaattaacggctgacggcgcgttgccattcgctaatccatgcctgacgttgtgccgccacttcggctggcgtgaactccaacgtggttgcgggtttggtcaatttttcaaaaccggcaggcagcgtgacgtttgccaccggatacatccagttgccggttgggatcgcattctggaaagccggagaaaccataaactggaggaatttttgcgccagctccggctgcttgctggcagcggtgcgggcggcgacttccacttgcagatagtgaccttcgctgaagttcgcggcggcgtagttatctttcttctcttcgagaatgtgataagccggagaggtggtgtaactcagtaccagatcgctttcaccttttaaaaacaggccgtaggcttcgctccagcctttggtgaccgtgaccgttttcttcgccagtttctgccaggcttgtggggcgtcatcgccatagactttttgcatccatagcaacagacccagccccggtgtactggtgcgcggatcctgataaatcacccgccagttttgatcgctctcaaccagttctttcaggctttgtggcgggtttttcagtttgttcttgtcataaacgaaggcgaagtagccataatcaaacggtacgaaagtgtcattattccagccgccgggaacgttaacggcatccgctgccacaccgcttttggcaaacagtccggttttactggcggcgtctaacaggttgttatccagccccagcaccacatcggctttactgtttttgccttccatccgtagacggttgagaaggctaacgccatcttccagcgccaccagtttcagttcgcaattacagtcggcttcaaaggcttttttaaccaccggaccaggcccccagtcggcggcgaaggaatcgtaggtataaacagtcagaacgggtttagcgaaaacgggcgctgtgcacagcaacagcaggggcagacatttttttaacactttgcacctcaaaaaagagtggcaaaggacttgagaaggagcctcaaatcccttcgccggcgttatccggatcaggttcgacgggtattttctcagcgcacgcgtacgcgtggcaccccgttgagaacggcgttagtgtagtgattttgttatcaaccagcaatcatggatccggtggcgcaaaccacgcacttttaaaatcgaaccagccgagggtattcatgcgcaggccgcgcatactgcgttgcccctgaatgatcagccagtggtgcaataatggcaccatcgctttgctggcgaccagttgctggcaccagttcgccagattcatctcgccattgcgccagcgagcagcgtcggcttgccagtcaatgggaatgcaatgttgtagcagtggcacttcgcataaatgtgcgaaaacagagaagtccagcggcagggtaaagttggcgctgtttagccagatatcactttcgatctctcctgtatgccactgatcgtagtcgatctctttgattttcagcgtgacctggtgacttgccagaatctgctgcatgatcccggcaatcacccgatgctcactgtgatcctgataaaaggttagggtgaggctttccaggccagccggtttttcgctctttatggtgcgggcatggtgccaacgggggagcagtccataagccgggaaccacagttgctggtactgttcctcagcgaaatagaccagattagttggagaaagcacatagcttacccagtccctgacttgctgattcgccccgcgatgggtgcggctgtcgaacagtaaatagtagcaaccttcctccaggcggctttcaatctctttttcctcgccctgtggaccttttagcatcagccctccggctggctcgtcggcaatttccggcagaacccagacgttaacttcgtcgattaatgcccggtaaccgaagaagtcatcgaatgcctgaattttcagttgattggtgctgttgcgaatcaccgcatacggaccggtgccgatgggatggctggcaaagttactgagggtttcccattcgcgcggcaggatcatcgccggaacttgccccagcagtaacggtaaccagcggtccggttgcgtgagatggatatccagcgtccagggcgtcgggctcacaatgtcagcaatatggctatagagcggcagcgtattgattcgttttaaagaggcgatcacatcgtccatttccagttcacgaccatggtgaaaatggactcctggacgcaaaaagaaacgccagtgaagcggactaatttgctgccagtggtgggcgatgtctgcttccagttccccattttcctcatttatgcgcgttaggctactgaagatttgccgggcgatatgggtttcggaacggcgcaatgcgctgccaggtagcagattacgcaacggacgatagtagagcacgcgcaggatgtgccgcccctggcggaagctgcggcccagatgagaaaccagcatttgccgcacagtcgctttgtcgccaaccaactgcaccagttgatcgatacgatcctgctccagcaggtcttccgcccgctgttgctgaagcgccagcccggtatagaggaatgtcagacggctgcgtttaccgcgcccgacttccgcttcccacgtcagccagccgcgatcctgcatggtgttgagcagggtgcgcatatgacgacggctgcagctcaataacgctgccagttcgttgagcgttgtgtcctggcttttaccctcgcagcattgccacaggcggatgaactgttgttgcagacgagcagatggcataaaaggggaactcctgtgcaaaagacagcaattttattttccctatattaagtcaataattcctaacgatgaagcaagggggtgccccatgcgtcagttttatcagcactattttaccgcgacagcgaagttgtgctggttgcgttggttaagcgtcccacaacgattaaccatgcttgaaggactgatgcagtgggatgaccgcaattctgaaagttgacttgcctgcatcatgtgtgactgagtattggtgtaaaatcacccgccagcagattatacctgctggttttttttattctcgccgcgctaaaaagggaacgtatgatctggataatgacgatggctcgccgtatgaacggtgtttacgcggcatttatgctggtcgcttttatgatgggggtggccggggcgctacaggctcctacattgagcttatttctgagtcgtgaggttggcgcgcaacctttctggatcggcctcttttatacggtgaatgctattgctgggatcggcgtaagcctctggttggcaaaacgttctgacagtcagggcgatcggcgaaaactgattatattttgctgtttgatggctatcggcaatgcgctattgtttgcatttaatcgtcattatctgacgcttatcacctgtggtgtgcttctggcatctctggccaatacggcaatgccacagttatttgctctggcgcgggaatatgcggataacagcgcgcgagaagtggtgatgtttagcagcgtgatgcgtgcgcagctttctctggcatgggttatcggtccaccgttggcctttatgctggcgttgaattacggctttacggtgatgtttagcattgccgccgggatattcacactcagtctggtattgattgcatttatgcttccgtctgtggcgcgggtagaactgccgagcgaaaatgctttaagtatgcaaggtggctggcaggatagtaacgtacggatgttatttgtcgccagcacgttaatgcggacctgcaacaccatgtacattattgatatgccgttgtggatcagtagcgagttaggattgccagacaaactggcgggtttcctgatggggacggcagctggactggaaataccagcaatgattctggctggctactatgtcaaacgttatggtaagcggcgaatgatggtcatagcagtggcggcaggagtactgttttacaccggattgattttctttaatagccgtatggcgttgatgacgctgcaactttttaacgctgtatttatcggcattgttgcgggtattgggatgctatggtttcaggatttaatgcctggaagagcgggggcagctaccaccttatttactaacagtatttctaccggggtaattctggctggcgttattcagggagcaattgcacaaagttgggggcactttgctgtctactgggtaattgcggttatttctgttgtcgcattatttttaaccgcaaaggttaaagacgtttgatgacgtggacgatagcggaaagcccggtcatttgaccgggcaaggggattaattcataaacgcaggttgttttgcttcataagcggcaatggcgtcgtcgtgctgcaaggtaagcccaatactgtccagaccgttcatcatgcagtggcggcggaaggcatcgatggtaaagcgataggttttctctcccgctttcacctcttgcgcttccagatccacgtcgaaatggatccccggattagctttcaccagcgcaaacagttcgtccacttctgcatcgcttaatttcaccggcagcagctggttgttaaagctattgccgtagaagatgtcagcaaaactcggcgcaatcaccactttaaaaccgtagtcggtcaatgcccagggcgcgtgctcacggctagagccacagccgaagttttctcgtgccagcaaaatggaagcgccctgatactgcgggaagttcagcacgaagtccgggtttggctgttggcctttttcatccagaaaacgccagtcgttaaacagatgcgcgccaaaacccgtacgggtcactttctgcaaaaactgtttcgggatgattgcatcggtatcgacattggcggcatccagcggaaccaccaggcctgtgtgtttgataaatttctctgccatggtgtgctccttatttaatgttgcgaatgtcggcgaaatgtccggtcacagcagcagcggcagccattgccgggctgaccagatgcgtgcgcccgccgcgcccctggcggccttcaaagttacggttgctggtggaggcacaacgttcgcccggattcagacggtcgttgttcatcgccagacacatactgcagccaggcaagcgccattcaaaaccggcttcaataaagattttatccagaccttccgcttccgcctgggcttttaccgggccagagccgggaaccaccagtgcctgcacgcctggcgcgacttttcgccctttggcgatctccgctgccgcgcgtaaatcttcaatgcggctgttggtacaggaaccgataaacactttgtcgatagccacttcggtcagcggaatacccggtttcagccccatataggccagcgctttttctgcgctcgcgcgttcaaccggatcggcaaagctagccggatcgggaatattgtcgttcacggaaatcacctggccgggattggtgccccaggtgacctgcggactaatttcttctgcttgcagagtgacaacggtatcgaaagttgcgccttcgtcggtttgcagggttttccagtaggcaacggcgtcgtcgaaatctttgcctttcggcgcatgcagacggcctttgacatagttaaaggtggtttcgtccggtgcaaccagaccggcttttgcgcccatttcgattgccatattgcacagggtcatacgaccttccatgcttaaatcacggattgcttcgccgcaaaactccaccacatgcccggtgccgcctgcgctaccggttttaccgataattgccagcacgatatcttttgcggtaatgcccggcgcggctttgccctggacttcaattttcatggtttttgcgcggccctgtttcagggtttgcgttgccagtacgtgttcaacttcggaagtgccgataccaaaggccagtgcgccaaacgcgccgtgggtggcggtatggctgtcgccgcagacaatggtcatccccggcaaggtgacgccctgttccggccccattacgtggacgatcccctgatacgggtgattcaggtcatacagttcgacgccaaattctttgcagtttttgatcagttcctgcatctggatacgcgccatttcaccgcaggcattaatgtctttggtctgggtagagacgttgtgatccatggtagcgaaggttttgcccggctgacgtaccgggcgaccgtgggcgcgcagaccatcgaacgcctgcggactggtcacttcatgcaccaggtggcggtcgatatataacagtggggtttcgttttcggcttcgtacacaacgtgagcgtcgaacaatttttcgtataacgtcttagccatgattacaccccttctgctacatagcgggcaatgatatcgcccatttcatcggtactaacggcggcagcgccacgggctaaatccccggtgcgaatgccttcttctaatgcgcggttaatggcgcgttcaatggcgcaagccgcatcatcggcatccaggctgtaacgcagcagcagtgccaggctaaggatttgtgcaatcgggttggcgatgtttttgcctgcgatatctggtgcgctgccgcccgccggttcatacagtccaaaaccttgctcgttcaggctggcggaaggcaacatccccatgctgccagtgatcattgcgcactcgtcagacagaatgtcgccaaacaggttggagcacagcagaacgtcaaactgacttggatctttaatcagctgcatggtggcgttgtcgatgtacatatgcgccagttcgacatccgggtattccgtggcgatctcgttaacgatctcccgccataaaatagaggattgcagcacgttggctttatcgatgctcgtcactttgtggcgacgcttgcgagcagattcaaacgcgatgcgggcgatacgttcgatctcaaaacggtgatacacctcggtatcaaaggctttttcatattgtccgctaccttcgcggccttttggctgaccgaaatagatgccgccggtcagttcgcgcacacacaggatgtcgaagccgtttgcggcaatgtctgcacgcagcggacagaatgcttccagcccctgatacagttttgccgggcgcaggttgctgaataatttgaagtgcttacgcagaggcagcagcgcgccgcgttctggttgctggtctggtggtaaatgttcccacttcgggccgcctacgctgccaaacagcacggcatcggcttgctcacaaccttcaaccgtcgcaggcggcagtggttgcccgtggttatcaatggctgcgccgcctacatcgtaatggctggtggtgatgcgcatcgcaaagcggttgcgcacggcatccagcactttcagcgcctgggtcatcacttccggaccaataccgtcccccggcaatacggcaatatggtaattcttgctcatcacacggtttccttgttgttttcgttgtgttgagctttgcgttgcaactctttttcgacttctgcggcacgccagatattgttcagaacgtgcaccatggctttggcagaactctcgacaatatcggtagccaggccgacgccgtggaagcggcgaccgttgtagttagcgacgatatccacctgacccagcgcatctttaccgtggcctttggcggtcaggctgtatttcaccagttcgacgttatattcagtgatgcggttaattgcctgatagacggcatcgaccggaccgttaccgttggcggcttctgctttgacttcttcgccacaggccagtttgacggcggcggtggcgatatcgttagagccagactgcacgctgaagtaatccagacggaaatgctccggctcttcttgctgcttaccgatgaaggccagcgcctccagatcgtaatcaaacacctgaccttttttgtccgccagcttcaggaaagcatcgtacaaattgtctaaattatattcactttctttataccccatctcatccatgcgatgtttcaccgccgcacgcccgctacgagaggtcagattcagctggatttggttcagaccaatagattctggtgtcatgatttcgtagttttcgcggtttttcagcacgccatcctggtgtataccggaggagtgtgcgaatgcgccgctgccaacaatggctttgtttgccgggatcggcatattacaaatctggctaactaactggctggtgcgccatatctcctggtgattaatggcggtgtggacgttgagaatatccttacgaactttgatcgccatgatgacttcttccagggaacagtttccggcacgctcgccgatcccgttcattgcgccttccacctggcgtgcaccggcatgtaccgccgccagactgtttccgaccgccaggcccaaatcgtcgtgggtatgtacggagataatggctttgtcgatgttaggcacgcgttcatacaggccgctgatgattccggcgaactcaaacggcatggtgtagcccacggtgtccggaatgttgatggtggtggcaccggcattaatcgccgcttcgaccactcgcgccagatcggcaatgggtgtacgcccggcatcttcgcaagaaaattcaacatcatcggtgtaattacgggcgcgtttcaccatatagatagcgcgttcgatcacctcgtccagcgtgctgcgcagcttggtggcgatgtgcattgggctagtggcaataaaggtatgaatacggaaggcttcggcgactttcagggattcggccgccacgtcgatatctttttccacgcagcgagctaacgcacatacgcggctgtttttaacctggcgggcgatggtttgcacgctttcaaaatcgcccgggctagagacggggaaaccgacttccatcacgtcaacacccatacgctcaagggccagcgcaatttgcagtttttctttcacactcaagcttgcctgtaacgcctgttcaccgtcgcgcaatgtggtatcgaaaataatgacttgctggctcatggtttgggtccttgtctcttttagagcgcctcgcttcgggcataaaaaaacccgcgcaatggcgcgggttttttgtttgactgcgtgctggcttaatgctggatgccgctcactcgtctaccgcgcaaagaagatgcgtttagtagtagtagaccgataaagcgaacgatgtgagtcattaaatcagctccagatgaatgcgatatgcttttagagttactggatacaaaaacggatgtcaaccctgacgcaataaaaacgtcccgccagcgtgagttctgcatccgtaaaattagctaattgtgctgcggtggttaaagtaagcgatattaatttctgcttaactaccgacgcttttcatcggttgacatatttcagcataaatttttgcatctaatcaacgaggaaaaaggggacaaaatgcacgcgttgcaaaacctatcctgatgatttgtattgaattatatgttttgcgattttttttgatattgatttggtgaatattattgatcaattaatgttaagaattaatgcattaaatatataaattaattattaaataagcacatttaatccattttgtagatgattgagtattcgcggtagttatgattagattgttttcgcaacaaaaacattatggattattatgctgtggtaaatgactcattccacggcaatggattctgtttttatcagaacccgtatctttatgttttccgaattttactcattttgctttttcttattttatatgcatgataaatcatattcttcaggattatttctctgcattccaataagggaaagggagttaagtgtgacagtggagttaagtatgccagaggtacaaacagatcatccagagacggcggagttaagcaaaccacagctacgcatggtcgatctcaacttattaaccgttttcgatgccgtgatgcaggagcaaaacattactcgtgccgctcatgttctgggaatgagccaacctgcggtcagtaacgctgttgcacgcctgaaggtgatgtttaatgacgagctttttgttcgttatggccgtggtattcaaccgactgctcgcgcatttcaactttttggtagtgttcgtcaggcattgcaactagtacaaaatgaattgcctggtagtggttttgaacccgcgagcagtgaacgtgtatttcatctttgtgtttgcagcccgttagacagcattctgaccagccagatttataatcacattgagcagattgcgccaaatatacatgttatgttcaagtctagtttaaatcagaacactgaacatcagctgcgttatcaggaaacggagtttgtgattagttatgaagacttccatcgtcctgaatttaccagcgtaccattatttaaagatgaaatggtgctggtagccagcaaaaatcatccaacaattaagggcccgttactgaaacatgatgtttataacgaacaacatgcggcggttagcctcgatcgtttcgcgagttttagtcaaccttggtatgacacggtagataagcaagccagtatcgcgtatcagggcatggcaatgatgagcgtacttagcgtggtgagccaaacgcatttggtcgctattgcgccgcgttggctggctgaagagttcgctgaatccttagaattacaggtattaccgctgccgttaaaacaaaacagcagaacctgttatctctcctggcatgaagctgccgggcgcgataaaggccatcagtggatggaagagcaattagtcagtatttgcaaacgctaactgattgcagaataggtcagacatgaatgtctggtttattctgcattttttattgaatgtagaattttattctgaatgtgtgggctctctattttaggattaattaaaaaaatagagaaattgctgtaagttgtgggattcagccgatttattatcaatttaatcctctgtaatggaggattttatcgtttcttttcacctttcctcctgtttattcttattaccccgtgtttatgtctctggctgccaattgcttaagcaagatcggacggttaatgtgttttacacattttttccgtcaaacagtgaggcaggccatggagatgttgtctggagccgagatggtcgtccgaagccttatcgatcagggcgttaaacaagtattcggttatcccggaggcgcagtccttgatatttatgatgcattgcataccgtgggtggtattgatcatgtattagttcgtcatgagcaggcggcggtgcatatggccgatggcctggcgcgcgcgaccggggaagtcggcgtcgtgctggtaacgagcggtccaggggcgaccaatgcgattactggcatcgccaccgcttatatggattccattccattagttgtcctttccgggcaggtagcgaccagcttgataggttacgatgcctttcaggagtgcgacatggtggggattagccgaccggtggttaaacacagttttctggttaagcaaacggaagacattccgcaggtgctgaaaaaggctttctggctggcggcaagtggtcgcccaggaccagtagtcgttgatttaccgaaagatattcttaatccggcgaacaaattaccctatgtctggccggagagcgtcagtatgcgttcttacaatcccactactaccggacataaagggcaaattaagcgtgctctgcaaacgctggtagcggcaaaaaaaccggttgtctacgtaggcggtggggcaatcacggcgggctgccatcagcagttgaaagaaacggtggaggcgttgaatctgcccgttgtttgcagtttgatggggctgggggcgtttccggcaacgcatcgtcaggcactgggcatgctgggaatgcacggtacctacgaagccaatatgacgatgcataacgcggatgtgattttcgccgtcggggtacgatttgatgaccgaacgacgaacaatctggcaaagtactgcccaaatgccactgttctgcatatcgatattgatcctacttccatttctaaaaccgtgactgcggatatcccgattgtgggggatgctcgccaggtcctcgaacaaatgcttgaactcttgagccaagaatccgcccatcaaccactggatgagatccgcgactggtggcagcaaattgaacagtggcgcgctcgtcagtgcctgaaatatgacactcacagtgaaaagattaaaccgcaggcggtgatcgagactctttggcggttgacgaagggagacgcttacgtgacgtccgatgtcgggcagcaccagatgtttgctgcactttattatccattcgacaaaccgcgtcgctggatcaattccggtggcctcggcacgatgggttttggtttacctgcggcactgggcgtcaaaatggcgttgccagaagaaaccgtggtttgcgtcactggcgacggcagtattcagatgaacatccaggaactgtctaccgcgttgcaatacgagttgcccgtactggtggtgaatctcaataaccgctatctggggatggtgaagcagtggcaggacatgatctattccggccgtcatagtcaatcttatatgcaaagcctacccgatttcgtccgtctggcggaagcctatgggcatgtcgggatccagatttctcatccgcatgagctggaaagcaaacttagcgaggcgctggaacaggtgcgcaataatcgcctggtgtttgttgatgttaccgtcgatggcagcgagcacgtctacccgatgcagattcgcgggggcggaatggatgaaatgtggttaagcaaaacggagagaacctgattatgcgccggatattaagtgtcttactcgaaaatgaaagtggcgcgttatcccgcgtgattggccttttttcccagcgtggctacaacattgaaagcctgaccgttgcgccaaccgacgatccgacattaagccgtatgaccatccagaccgtgggcgatgaaaaagtacttgagcagatcgaaaagcaattacacaaactggtcgatgtcttgcgcgtgagtgagttggggcagggcgcgcatgttgagcgggaaatcatgctggtgaaaattcaggccagcggttacgggcgtgacgaagtgaaacgtaatacggaaatattccgtgggcaaattatcgatgtcacacccagcctttataccgttcaattagcaggcaccagcggtaagcttgatgcatttttagcaagcattcgcgatgtggcgaaaattgtggaggttgctcgctctggtgtggtcggacttagccgcggcgataaaataatgcgttgagaatgatctcaatgcgcaatttacagcccaacatgtcacgttgggctttttttgcgaaatcagtgggaacctggaataaaagcagttgccgcagttaattttctgcgcttagatgttaatgaatttaacccataccagtacaatggctatggtttttacattttacgcaaggggcaattgtgaaactggatgaaatcgctcggctggcgggagtgagccggaccactgcaagctatgttattaacggcaaagcgaagcaataccgtgtgagcgacaaaaccgttgaaaaagtcatggctgtggtgcgtgagcacaattaccacccgaacgccgtggcagctgggcttcgtgctggacgcacacgttctattggtcttgtgatccccgatctggagaacaccagctatacccgcatcgctaactatcttgaacgccaggcgcggcaacggggttatcaactgctgattgcctgcagtgaagatcagccagacaacgaaatgcggtgcattgagcaccttttacagcgtcaggttgatgccattattgttagcacgagcttgcctcctgagcatcctttttatcaacgctgggctaacgacccgttcccgattgtcgcgctggaccgcgccctcgatcgtgaacacttcaccagcgtggttggtgccgatcaggatgatgccgaaatgctggcggaagagttacgtaagtttcccgccgagacggtgctttatcttggtgcgctaccggagctttctgtcagcttcctgcgtgaacaaggtttccgtactgcctggaaagatgatccgcgcgaagtgcatttcctgtatgccaacagctatgagcgggaggcggctgcccagttattcgaaaaatggctggaaacgcatccgatgccgcaggcgctgttcacaacgagctttgcgttgttgcaaggagtgatggatgtcacgctgcgtcgcgacggcaaactgccttctgacctggcaattgccacctttggcgataacgaactgctcgacttcttacagtgtccggtgctggcagtggctcaacgtcaccgcgatgtcgcagagcgtgtgctggagattgtcctggcaagcctggacgaaccgcgtaagccaaaacctggtttaacgcgcattaaacgtaatctctatcgccgcggcgtgctcagccgtagctaagccgcgaacaaaaatacgcgccaggtgaatttccctctggcgcgtagagtacgggactggacatcaatatgcttaaagtaaataagactattcctgactattattgataaatgcttttaaacccgcccgttaattaactcaccagctgaaattcacaataattaagtgatatcgacagcgcgtttttgcattattttgttacatgcggcgatgaattgccgatttaacaaacacttttctttgcttttgcgcaaacccgctggcatcaagcgccacacagacgtaacaaggactgttaaccggggaagatatgtcctaaaatgccgctcgcgtcgcaaactgacactttatatttgctgtggaaaatagtgagtcattttaaaacggtgatgacgatgagggattttttcttacagctattcataacgttaatttgcttcgcacgttggacgtaaaataaacaacgctgatattagccgtaaacatcgggttttttacctcggtatgccttgtgactggcttgacaagcttttcctcagctccgtaaactcctttcagtgggaaattgtggggcaaagtgggaataaggggtgaggctggcatgttccggggagcaacgttagtcaatctcgacagcaaagggcgcttaagtgtgcctacccgttatcgggaacagctgcttgagaacgctgccggtcaaatggtttgcaccattgacatttatcacccgtgcctgctgctttaccccctgcctgaatgggaaattatcgagcaaaaattaagccgtctgagcagcatgaacccggttgagcgccgtgtgcagcgcctactgttaggtcatgccagcgaatgtcagatggatggcgcaggtcgattgttaatcgcgccagtactgcggcaacatgccgggctgacaaaagaagtgatgctggttggacagttcaacaagtttgagctgtgggatgaaacaacctggcatcaacaggtcaaggaagatatcgacgcagagcagttggctaccggagacttaagcgagcgactgcaggacttgtctctataaaatgatggaaaactataaacatactacggtgctgctggatgaagccgttaatggcctcaatatccgtcctgatggcatctacattgatgggacttttggtcgcggtggtcacagtcgtctgatcctcagccagcttggcgaagaggggcgtttgctggcgatcgatcgcgacccgcaggctatcgccgttgcgaagactattgatgatccgcgcttctccatcatccacggacctttctccgcgctgggcgaatacgttgccgagcgcgatcttatcggcaagatcgacggcattctcctcgatcttggcgtctctagtccgcaacttgatgatgctgaacgtggcttttcctttatgcgcgatggtccgctggacatgcgtatggacccaacccgtgggcagagtgccgctgaatggctacaaaccgcagaagaagccgatatcgcctgggtattgaaaacctatggtgaagagcgttttgccaaacgcattgcccgcgccattgtcgagcgtaaccgcgaacagccgatgacccgcaccaaagaactggcggaagtcgtggctgctgcaacgccggtgaaagataagtttaaacatcccgcgacccgtaccttccaggcggtgcgcatttgggtaaacagtgaactggaggagatagagcaggcgctaaaaagcagcctcaacgtgctggccccgggtgggcggcttagcatcatcagcttccacagcctggaagaccgtattgtgaaacgttttatgcgtgaaaacagccgcggtccgcaagttccggcagggttaccgatgactgaagagcagctcaaaaaactgggtggccgtcagctgcgagcactaggcaagttaatgccgggcgaagaagaggtggctgagaaccctcgtgcccgtagtagtgttctgcgtattgcagagaggacgaatgcatgatcagcagagtgacagaagctctaagcaaagttaaaggaagcatgggaagccacgagcgccatgcattgcctggtgttatcggtgacgatcttttgcgatttgggaagctgccactctgcctgttcatttgcattattttgacggcggtgactgtggtaaccacggcgcaccatacccgtttactgaccgctcagcgcgaacaactggtgctggagcgagatgctttagacattgaatggcgcaacctgatccttgaagagaatgcgctcggcgaccatagccgggtggaaaggatcgccacggaaaagctgcaaatgcagcatgttgatccgagtcaagaaaatatcgtagtgcaaaaataaggataaacgcgacgcatgaaagcagcggcgaaaacgcagaaaccaaaacgtcaggaagaacatgccaactttatcagttggcgttttgcgttgttatgcggctgtattctcctggcgctggcttttctgctcggacgcgtagcgtggttacaagttatctccccggatatgctggtgaaagagggcgacatgcgttctcttcgcgttcagcaagtttccacctcccgcggcatgattactgaccgttctggtcgcccgttagcggtgagcgtgccggtaaaagcgatttgggctgacccgaaagaagtgcatgacgctggcggtatcagcgtcggtgaccgctggaaggcgctggctaacgcgctcaatattccgctggatcagcttagtgcccgcattaacgccaacccgaaagggcgctttatttatctggcgcgtcaggtgaaccctgacatggcggactacatcaaaaaactgaaactgccggggattcatctgcgtgaagagtctcgccgttactatccgtccggcgaagtgactgctcacctcatcggctttactaacgtcgatagtcaagggattgagggcgttgagaagagtttcgataaatggcttaccgggcagccgggtgagcgcattgtgcgtaaagaccgctatggtcgcgtaattgaagatatttcttctactgacagccaggcagcgcacaacctggcgctgagtattgatgaacgcctgcaggcgctggtttatcgcgaactgaacaacgcggtggcctttaacaaggctgaatctggtagcgccgtgctggtggatgtcaacaccggtgaagtgctggcgatggctaacagcccgagttacaaccctaacaatctgagcggcacgccgaaagaggcgatgcgtaaccgtaccatcaccgacgtgtttgaaccgggcagtacggttaaaccgatggtggtaatgaccgcgttgcaacgtggcgtggtgcgggaaaacagcgtactcaataccattccttatcgaattaacggccacgaaatcaaagacgtggcacgctacagcgaattaaccctgaccggggtattacagaagagcagtaacgtcggtgtttccaagctggcgttagcgatgccgtccagtgcgttagtagatacttacagtcgttttggactgggaaaagcgaccaatttggggttggtcggagaacgcagtggcttatatcctcaaaaacaacggtggtctgacatagagagggccaccttctctttcggctacgggctaatggtaacaccattacagttagcgcgagtctacgcaactatcggcagctacggcatttatcgcccactgagcattaccaaagttgaccccccggttcccggtgaacgtgtcttcccggaatccattgtccgcactgtggtgcatatgatggaaagcgtggcgctaccaggcggcggcggcgtgaaggcggcgattaaaggctatcgtatcgccattaaaaccggtaccgcgaaaaaggtcgggccggacggtcgctacatcaataaatatattgcttataccgcaggcgttgcgcctgcgagtcagccgcgcttcgcgctggttgttgttatcaacgatccgcaggcgggtaaatactacggcggcgccgtttccgcgccggtctttggtgccatcatgggcggcgtattgcgtaccatgaacatcgagccggatgcgctgacaacgggcgataaaaatgaatttgtgattaatcaaggcgaggggacaggtggcagaagctaaagcctgagcgcttcgcgctggttgttgttatcaacgatccgcaggcgggtaaatactacggcggcgccgtttccgcgccggtctttggtgccatcatgggcggcgtattgcgtaccatgaacatcgagccggatgcgctgacaacgggcgataaaaatgaatttgtgattaatcaaggcgaggggacaggtggcagatcgtaatttgcgcgaccttcttgctccgtgggtgccagacgcacctagccgagcactgcgagagatgacactcgacagccgtgtggctgcggcgggcgatctctttgtagctgtagtaggtcatcaggcggacgggcgtcgatatatcccgcaggcgatagcgcaaggtgtggctgccattattgcagaggcgaaagatgaggcgaccgatggtgaaatccgtgaaatgcacggcgtaccggtcatctatctcagccagctcaacgagcgtttatctgcactggcgggccgcttttaccatgaaccctctgacaatttacgtctcgtgggcgtaacgggcaccaacggcaaaaccacgactacccagctgttggcgcagtggagccaactgcttggcgaaatcagcgcggtaatgggcaccgttggtaacggcctgctggggaaagtgatcccgacagaaaatacaaccggtagcgcagtcgatgttcagcatgagctggcggggctggtggatcagggcgcgacgttttgcgcaatggaagtttcctcccacgggctggtacagcaccgtgtggcggcattgaaatttgcggcgagcgtctttaccaacttaagccgcgatcaccttgattatcatggtgatatggaacactacgaagccgcgaaatggctgctttattctgagcatcattgcggtcaggcgattattaacgccgacgatgaagtgggccgccgctggctggcaaaactgccggacgcggttgcggtaagtatggaagatcatattaatccgaactgtcacggacgctggttgaaagcgaccgaagtgaactatcacgacagcggtgcgacgattcgctttagcagtagttggggcgatggcgaaattgaaagccatctgatgggcgcttttaacgtcagcaacctgctgctcgcgctggcgacactgttggcactcggctatccactggctgatctgctgaaaaccgccgcgcgtctgcaaccggtttgcggacgtatggaagtgttcactgcgccaggcaaaccgacggtggtggtggattacgcgcatacgccggatgcactggaaaaagccttacaggcggcgcgtctgcactgtgcgggcaagctgtggtgtgtctttggctgtggtggcgatcgcgataaaggtaagcgtccactgatgggcgcaattgccgaagagtttgctgacgtggcggtggtgacggacgataacccgcgtaccgaagaaccgcgtgccatcatcaacgatattctggcgggaatgttagatgccggacatgccaaagtgatggaaggccgtgctgaagcggtgacttgcgccgttatgcaggctaaagagaatgatgtggtactggtcgcgggcaaaggccatgaagattaccagattgttggcaatcagcgtctggactactccgatcgcgtcacggtggcgcgtctgctgggggtgattgcatgattagcgtaacccttagccaacttaccgacattctcaacggtgaactgcaaggtgcagatatcacccttgatgctgtaaccactgatacccgaaaactgacgccgggctgcctgtttgttgccctgaaaggcgaacgttttgatgcccacgattttgccgaccaggcgaaagctggcggcgcaggcgcactactggttagccgtccgctggacatcgacctgccgcagttaatcgtcaaggatacgcgtctggcgtttggtgaactggctgcatgggttcgccagcaagttccggcgcgcgtggttgctctgacggggtcctccggcaaaacctccgttaaagagatgacggcggcgattttaagccagtgcggcaacacgctttatacggcaggcaatctcaacaacgacatcggtgtaccgatgacgctgttgcgcttaacgccggaatacgattacgcagttattgaacttggcgcgaaccatcagggcgaaatagcctggactgtgagtctgactcgcccggaagctgcgctggtcaacaacctggcagcggcgcatctggaaggttttggcagccttgcgggtgtcgcgaaagcgaaaggtgaaatctttagcggcctgccggaaaacggtatcgccattatgaacgccgacaacaacgactggctgaactggcagagcgtaattggcagtcgcaaagtgtggcgtttcagtcccaatgccgccaacagcgatttcaccgccaccaatatccatgtgaccagccacggtacggaatttaccctacaaaccccaaccggtagcgtcgatgttctgctgccgttgccggggcgtcacaatattgcgaatgcgctggcagccgctgcgctctccatgtccgtgggcgcaacgcttgatgctatcaaagcggggctggcaaatctgaaagctgttccaggccgtctgttccccatccaactggcagaaaaccagttgctgctcgacgactcctacaacgccaatgtcggtagtatgactgcagcagtccaggtactggctgaaatgccgggctaccgcgtgctggtggtgggcgatatggcggaactgggcgctgaaagcgaagcctgccatgtacaggtgggcgaggcggcaaaagctgctggtattgaccgcgtgttaagcgtgggtaaacaaagccatgctatcagcaccgccagcggcgttggcgaacattttgctgataaaactgcgttaattacgcgtcttaaattactgattgctgagcaacaggtaattacgattttagttaagggtagtcgtagtgccgccatggaagaggtagtacgcgctttacaggagaatgggacatgttaatataagctttacaggagaatgggacatgttagtttggctggccgaacatttggtcaaatattattccggctttaacgtcttttcctatctgacgtttcgcgccatcgtcagcctgctgaccgcgctgttcatcagtttgtggatgggcccgcgtatgattgctcatttgcaaaaactttcctttggtcaggtggtgcgtaacgacggtcctgaaagtcacttcagcaagcgcggtacgccgaccatgggcgggattatgatcctgacggcgattgtgatctccgtactgctgtgggcttacccgtccaatccgtacgtctggtgcgtgttggtggtgctggtaggttacggtgttattggctttgttgatgattatcgcaaagtggtgcgtaaagacaccaaagggttgatcgctcgttggaagtatttctggatgagcgtcattgcgctgggtgtcgccttcgccctgtaccttgccggcaaagacacgcccgcaacgcagctggtggtcccattctttaaagatgtgatgccgcagctggggctgttctacattctgctggcttacttcgtcattgtgggtactggcaacgcggtaaacctgaccgatggtctcgacggcctggcaattatgccgaccgtatttgtcgccggtggttttgcgctggtggcgtgggcgaccggcaatatgaactttgccagctacttgcatataccgtatctgcgacacgccggggaactggttattgtctgtaccgcgatagtcggggcaggactgggcttcctgtggtttaacacctatccggcgcaggtctttatgggcgatgtaggtagcctggcgttaggtggtgcgttaggcattatcgccgtactgctacgtcaggaattcctgctggtgattatggggggcgtgttcgtggtagaaacgctttctgtcatcctgcaggtcggctcctttaaactgcgcggacaacgtattttccgcatggcaccgattcatcaccactatgaactgaaaggctggccggaaccgcgcgtcattgtgcgtttctggattattagcctgatgctggttctgattggtctggcaacgctgaaggtacgttaatcatggctgattatcagggtaaaaatgtcgtcattatcggcctgggcctcaccgggctttcctgcgtggactttttcctcgctcgcggtgtgacgccgcgcgttatggatacgcgtatgacaccgcctggcctggataaattacccgaagccgtagaacgccacacgggcagtctgaatgatgaatggctgatggcggcagatctgattgtcgccagtcccggtattgcactggcgcatccatccttaagcgctgccgctgatgccggaatcgaaatcgttggcgatatcgagctgttctgtcgcgaagcacaagcaccgattgtggcgattaccggttctaacggcaaaagcacggtcaccacgctagtgggtgaaatggcgaaagcggcgggggttaacgttggtgtgggtggcaatattggcctgcctgcgttgatgctactggatgatgagtgtgaactgtacgtgctggaactgagcagcttccagctggaaaccacctccagcttacaggcggtagcagcgaccattctgaacgtgactgaagatcatatggatcgctatccgtttggtttacaacagtatcgtgcagcaaaactgcgcatttacgaaaacgcgaaagtttgcgtggttaatgctgatgatgccttaacaatgccgattcgcggtgcggatgaacgctgcgtcagctttggcgtcaacatgggtgactatcacctgaatcatcagcagggcgaaacctggctgcgggttaaaggcgagaaagtgctgaatgtgaaagagatgaaactttccgggcagcataactacaccaatgcgctggcggcgctggcgctggcagatgctgcagggttaccgcgtgccagcagcctgaaagcgttaaccacattcactggtctgccgcatcgctttgaagttgtgctggagcataacggcgtacgttggattaacgatagcaaagcgaccaacgtcggcagtacggaagcggcgctgaatggcctgcacgtagacggcacactgcatttgttgctgggtggcgatggtaaaagcgcggactttagcccactggcgcgttacctgaatggcgataacgtacgtctgtattgtttcggtcgtgacggcgcgcagctggcggcgctacgtccggaagtggcagaacaaaccgaaactatggaacaggcgatgcgcttgctggctccgcgtgttcagccgggcgatatggttctgctctccccagcctgtgccagccttgatcagttcaagaactttgaacaacgaggcaatgagtttgcccgtctggcgaaggagttaggttgatgcgtttatctctccctcgcctgaaaatgccgcgcctgccaggattcagtatcctggtctggatctccacggcgctaaagggctgggtgatgggcagccgggaaaaagataccgacagcctgatcatgtacgatcgcaccttactgtggctgaccttcggcctcgcggcgattggctttatcatggtgaccagcgcgagtatgcccatagggcaacgcttaaccaacgatccgttcttcttcgcgaagcgtgatggtgtctatctgattttggcgtttattctggcgatcattacgctgcgtctgccgatggagttctggcaacgctacagtgccacgatgctgctcggatctatcatcctgctgatgatcgtcctggtagtgggtagcagcgttaaaggggcaagccgttggatcgatctcggtttgctgcgtatccagcctgcggagctgacaaaactgagcctgttttgctatatcgccaactatctggtgcgtaaaggcgacgaagtacgtaataacctgcgcggcttcctgaaaccgatgggcgtgattctggtgttggcagtgttactgctggcacagccagaccttggtacggtggtggtgttgtttgtgactacgctggcgatgttgttcctggcgggagcgaaattgtggcagttcattgccattatcggtatgggcattagtgcggttgtgttgctgatactcgccgaaccgtaccgtatccgccgtgttaccgcattctggaacccgtgggaagatccctttggcagcggctatcagttaacgcaaagcctgatggcgtttggtcgcggcgaactttgggggcaaggtttaggtaacagcgtacaaaaactggagtatctgccggaagcgcacactgactttattttcgccattatcggcgaagaactggggtatgtcggtgtggtgctggcacttttaatggtattcttcgtcgcttttcgcgcgatgagcattggccgtaaagcattagaaattgaccaccgtttttccggttttctcgcctgttctattggcatctggtttagcttccaggcgctggttaacgtaggcgcggcggcggggatgttaccgaccaaaggtctgacattgccgctgatcagttacggtggtagcagcttactgattatgagcacagccatcatgatgctgttgcgtattgattatgaaacgcgtctggagaaagcgcaggcgtttgtacgaggtagtcgatgagtggtcaaggaaagcgattaatggtgatggcaggcggaaccggtggacatgtattcccgggactggcggttgcgcaccatctaatggctcagggttggcaagttcgctggctggggactgccgaccgtatggaagcggacttagtgccaaaacatggcatcgaaattgatttcattcgtatctctggtctgcgtggaaaaggtataaaagcactgatagctgccccgctgcgtatcttcaacgcctggcgtcaggcgcgggcgattatgaaagcgtacaaacctgacgtggtgctcggtatgggaggctacgtgagtggtccaggtggtctggccgcgtggagcttaggcattccggttgtacttcatgaacaaaacggtattgcgggcttaaccaataaatggctggcgaagattgccaccaaagtgatgcaggcgtttccaggtgctttccctaatgcggaagtagtgggtaacccggtgcgtaccgatgtgttggcgctgccgttgccgcagcaacgtttggctggacgtgaaggtccggttcgtgtgctggtagtgggtggttctcagggcgcacgcattcttaaccagacaatgccgcaggttgctgcgaaactgggtgatagtgtcactatctggcatcagagcggcaaaggtagccaacaatccgttgaacaggcgtatgccgaagcggggcaaccgcagcataaagtgacggaatttattgatgatatggcggcggcgtatgcgtgggcggatgtcgtcgtttgccgctccggtgcgttaacggtgagtgaaatcgccgcggcaggactaccggcgttgtttgtgccgtttcaacataaagaccgccagcaatactggaatgcgctaccgctggaaaaagcgggcgcagccaaaattatcgagcagccacagcttagcgtggatgctgtcgccaacaccctggccgggtggagccgagaaaccttattaaccatggcagaacgcgcccgcgctgcatccattccggatgccaccgagcgagtggcaaatgaagtgagccgggttgcccgggcgtaattgtagcgatgccttttgcatcgtatgaatttaagaagttaatggcgtaaagaatgaatacacaacaattggcaaaactgcgttccatcgtgcccgaaatgcgtcgcgttcggcacatacattttgtcggcattggtggtgccggtatgggcggtattgccgaagttctggccaatgaaggttatcagatcagtggttccgatttagcgccaaatccggtcacgcagcagttaatgaatctgggtgcgacgatttatttcaaccatcgcccggaaaacgtacgtgatgccagcgtggtcgttgtttccagcgcgatttctgccgataacccggaaattgtcgccgctcatgaagcgcgtattccggtgatccgtcgtgccgaaatgctggctgagttaatgcgttttcgtcatggcatcgccattgccggaacgcacggcaaaacgacaaccaccgcgatggtttccagcatctacgcagaagcggggctcgacccaaccttcgttaacggcgggctggtaaaagcggcgggggttcatgcgcgtttggggcatggtcggtacctgattgccgaagcagatgagagtgatgcaagcttcctgcatctgcaaccgatggtggcgattgtcaccaatatcgaagccgaccacatggatacctaccagggcgactttgagaatttaaaacagacttttattaattttctgcacaacctgccgttttacggtcgtgcggtgatgtgtgttgatgatccggtgatccgcgaattgttaccgcgagtggggcgtcagaccacgacttacggcttcagcgaagatgccgacgtgcgtgtagaagattatcagcagattggcccgcaggggcactttacgctgctgcgccaggacaaagagccgatgcgcgtcaccctgaatgcgccaggtcgtcataacgcgctgaacgccgcagctgcggttgcggttgctacggaagagggcattgacgacgaggctattttgcgggcgcttgaaagcttccaggggactggtcgccgttttgatttcctcggtgaattcccgctggagccagtgaatggtaaaagcggtacggcaatgctggtcgatgactacggccaccacccgacggaagtggacgccaccattaaagcggcgcgcgcaggctggccggataaaaacctggtaatgctgtttcagccgcaccgttttacccgtacgcgcgacctgtatgatgatttcgccaatgtgctgacgcaggttgataccctgttgatgctggaagtgtatccggctggcgaagcgccaattccgggagcggacagccgtagcctgtgtcgcacaattcgtggacgtgggaaaattgatcccattctggtgccggatccggcgcgggtagccgagatgctggcaccggtattaaccggtaacgacctgattctcgttcagggggctggtaatattggaaaaattgcccgttctttagctgaaatcaaactgaagccgcaaactccggaggaagaacaacatgactgataaaatcgcggtcctgttgggtgggacctccgctgagcgggaagtttctctgaattctggcgcagcggtgttagccggactgcgtgaaggcggtattgacgcgtatcctgtcgacccgaaagaagtcgacgtgacgcaactgaagagcatgggctttcagaaagtgtttatcgcgctacacggtcgcggcggtgaagatggtacgctgcaggggatgctcgagctgatgggcttgccttataccggaagcggagtgatggcatctgcgcttagtatggataaactacgcagcaaacttctatggcaaggtgccggtttaccggtcgcgccgtgggtagcgttaacccgcgcagagtttgaaaaaggcctgagcgataagcagttagcagaaatttctgctctgggtttgccggttatcgttaagccgagccgcgaaggttccagtgtgggaatgagtaaagtagtagcagaaaatgctctacaagatgcattaagattggcatttcagcacgatgaagaagtattgattgaaaaatggctaagtgggccggagttcacggttgcgatactcggtgaagaaattttaccgagtatacgtattcaaccgtccggaaccttctatgattatgaggcgaagtatctctctgatgagacacagtatttctgccccgcaggtctggaagcgagtcaagaggccaatttgcaggcattagtgctgaaagcatggacgacgttaggttgcaaaggatggggacgtattgacgttatgctggacagcgatggacagttttatctgctggaagccaataccagtccgggtatgaccagccacagcctggtgccgatggcggcacgtcaggcaggtatgagcttcagccagttggtagtacgaattctggaactggcggactaatatgagccaggctgctctgaacacgcgaaacagcgaagaagaggtttcttctcgccgcaataatggaacgcgtctggcggggatccttttcctgctgaccgttttaacgacagtgttggtgagcggctgggtcgtgttgggctggatggaagatgcgcaacgcctgccgctcagtaagctggtgttgaccggtgaacgccattacacacgtaatgacgatatccggcagagcatcctggcattgggtgagccgggtacctttatgacccaggatgtcaacatcatccagacgcaaatagaacaacgcctgccgtggattaagcaggtgagcgtcagaaagcagtggcctgatgaattgaagattcatctggttgaatatgtgccgattgcgcggtggaatgatcaacatatggtagacgcggaaggaaataccttcagcgtgccgccagaacgcaccagcaagcaggtgcttccaatgctgtatggcccggaaggcagcgccaatgaagtgttgcagggctatcgcgaaatggggcagatgctggcaaaggacagatttactctgaaggaagcggcgatgaccgcgcggcgttcctggcagttgacgctgaataacgatattaagctcaatcttggccggggcgatacgatgaaacgtttggctcgctttgtagaactttatccggttttacagcagcaggcgcaaaccgatggcaaacggattagctacgttgatttgcgttatgactctggagcggcagtaggctgggcgcccttgccgccagaggaatctactcagcaacaaaatcaggcacaggcagaacaacaatgatcaaggcgacggacagaaaactggtagtaggactggagattggtaccgcgaaggttgccgctttagtaggggaagttctgcccgacggtatggtcaatatcattggcgtgggcagctgcccgagccgtggtatggataaaggcggggtgaacgacctcgaatccgtggtcaagtgcgtacaacgcgccattgaccaggcagaattgatggcagattgtcagatctctagcgtatatctggcgctttctggtaagcacatcagctgccagaatgaaattggtatggtgcctatttctgaagaagaagtgacgcaagaagatgtggaaaacgtcgtccataccgcgaaaagcgtgcgtgtgcgcgatgagcatcgtgtgctgcatgtgatcccgcaagagtatgcgattgactatcaggaagggatcaagaatccggtaggacttagcggcgtgcggatgcaggcaaaagtgcacctgatcacatgtcacaacgatatggcgaaaaacatcgtcaaagcggttgaacgttgtgggctgaaagttgaccaactgatatttgccggactggcaagtagttatagcgtattgacggaagatgaacgtgaactgggtgtctgcgtcgtcgatatcggtggtggtacaatggatatcgccgtttataccggtggggcattgcgccacactaaggtaattccttatgctggcaatgtcgtgaccagtgatatcgcttacgcctttggcacgccgccaagcgacgccgaagcgattaaagttcgccacggttgtgcgctgggttccatcgttggaaaagatgagagcgtggaagtgccgagcgtaggtggtcgtccgccacggagtctgcaacgtcagacactggcagaggtgatcgagccgcgctataccgagctgctcaacctggtcaacgaagagatattgcagttgcaggaaaagcttcgccaacaaggggttaaacatcacctggcggcaggcattgtattaaccggtggcgcagcgcagatcgaaggtcttgcagcctgtgctcagcgcgtgtttcatacgcaagtgcgtatcggcgcgccgctgaacattaccggtttaacggattatgctcaggagccgtattatagcacggcggtgggattgcttcactatgggaaagagagtcatcttaacggtgaagctgaagtagaaaaacgtgttacagcaagtgttggcagctggatcaagcgactcaatagttggctgcgaaaagagttttaatttttatgaggccgacgatgattacggcctcaggcgacaggcacaaatcggagagaaactatgtttgaaccaatggaacttaccaatgacgcggtgattaaagtcatcggcgtcggcggcggcggcggtaatgctgttgaacacatggtgcgcgagcgcattgaaggtgttgaattcttcgcggtaaataccgatgcacaagcgctgcgtaaaacagcggttggacagacgattcaaatcggtagcggtatcaccaaaggactgggcgctggcgctaatccagaagttggccgcaatgcggctgatgaggatcgcgatgcattgcgtgcggcgctggaaggtgcagacatggtctttattgctgcgggtatgggtggtggtaccggtacaggtgcagcaccagtcgtcgctgaagtggcaaaagatttgggtatcctgaccgttgctgtcgtcactaagcctttcaactttgaaggcaagaagcgtatggcattcgcggagcaggggatcactgaactgtccaagcatgtggactctctgatcactatcccgaacgacaaactgctgaaagttctgggccgcggtatctccctgctggatgcgtttggcgcagcgaacgatgtactgaaaggcgctgtgcaaggtatcgctgaactgattactcgtccgggtttgatgaacgtggactttgcagacgtacgcaccgtaatgtctgagatgggctacgcaatgatgggttctggcgtggcgagcggtgaagaccgtgcggaagaagctgctgaaatggctatctcttctccgctgctggaagatatcgacctgtctggcgcgcgcggcgtgctggttaacatcacggcgggcttcgacctgcgtctggatgagttcgaaacggtaggtaacaccatccgtgcatttgcttccgacaacgcgactgtggttatcggtacttctcttgacccggatatgaatgacgagctgcgcgtaaccgttgttgcgacaggtatcggcatggacaaacgtcctgaaatcactctggtgaccaataagcaggttcagcagccagtgatggatcgctaccagcagcatgggatggctccgctgacccaggagcagaagccggttgctaaagtcgtgaatgacaatgcgccgcaaactgcgaaagagccggattatctggatatcccagcattcctgcgtaagcaagctgattaagaattgactggaatttgggtttcgaggctctttgtgctaaactggcccgccgaatgtatagtacacttcggttggataggtaatttggcgagataatacgatgatcaaacaaaggacacttaaacgtatcgttcaggcgacgggtgtcggtttacataccggcaagaaagtcaccctgacgttacgccctgcgccggccaacaccggggtcatctatcgtcgcaccgacttgaatccaccggtagatttcccggccgatgccaaatctgtgcgtgataccatgctctgtacgtgtctggtcaacgagcatgatgtacggattagtaccgtagagcacctcaatgctgctctcgcgggcttgggcatcgataacattgttatcgaagttaacgcgccggaaatcccgatcatggacggcagcgccgctccgtttgtatacctgctgcttgacgccggtatcgacgagttgaactgcgccaaaaaatttgttcgcatcaaagagactgttcgtgtcgaagatggcgataagtgggctgaatttaagccgtacaatggttttagcctggatttcaccatcgattttaaccatccggctattgattccagcaaccagcgctatgcgatgaacttctccgctgatgcgtttatgcgccagatcagccgtgcgcgtacgttcggtttcatgcgtgatatcgaatatctgcagtcccgtggtttgtgcctgggcggcagcttcgattgtgccatcgttgttgacgattatcgcgtactgaacgaagacggcctgcgttttgaagacgaatttgtgcgtcacaaaatgctcgatgcgatcggtgacttgttcatgtgtggtcacaatattattggtgcatttaccgcttataaatccggtcatgcactgaataacaaactgctgcaggctgtcctggcgaaacaggaagcctgggaatatgtgaccttccaggacgacgcagaactgccgttggccttcaaagcgcctagtgctgtactggcataacgacatttatactgtcgtataaaattcgactggcaaatctggcactctctccggccaggtgaaccagtcgtttttttttgaattttataagagctataaaaaacggtgcgaacgctgttttcttaagcacttttccgcacaacttatcttcattcgtgctgtggactgcaggctttaatgataagatttgtgcgctaaatacgtttgaatatgatcgggatggcaataacgtgagtggaatactgacgcgctggcgacagtttggtaaacgctacttctggccgcatctcttattagggatggttgcggcgagtttaggtttgcctgcgctcagcaacgccgccgaaccaaacgcgcccgcaaaagcgacaacccgcaaccacgagcctagtgccaaagttaactttggtcaattggccttgctggaagcgaacacacgccgcccgaatagcaactattccgttgattactggcatcaacatgccattcgcacggtaatccgtcatctttctttcgcaatggcaccgcaaacactgcccgttgctgaagaatctttgcctcttcaggcgcaacatcttgcattactggatacgctcagcgcgctgctgacccaggaaggcacgccgtctgaaaagggttatcgcattgattatgcgcattttaccccacaagcaaaattcagcacgcccgtctggataagccaggcgcaaggcatccgtgctggccctcaacgcctcacctaacaacaataaacctttacttcattttattaactccgcaacgcggggcgtttgagattttattatgctaatcaaattgttaactaaagttttcggtagtcgtaacgatcgcaccctgcgccggatgcgcaaagtggtcaacatcatcaatgccatggaaccggagatggaaaaactctccgacgaagaactgaaagggaaaaccgcagagtttcgtgcacgtctggaaaaaggcgaagtgctggaaaatctgatcccggaagctttcgccgtggtacgtgaggcaagtaagcgcgtctttggtatgcgtcacttcgacgttcagttactcggcggtatggttcttaacgaacgctgcatcgccgaaatgcgtaccggtgaaggaaaaaccctgaccgcaacgctgcctgcttacctgaacgcactaaccggtaaaggcgtgcacgtagttaccgtcaacgactacctggcgcaacgtgacgccgaaaacaaccgtccgctgtttgaattccttggcctgactgtcggtatcaacctgccgggcatgccagcaccggcaaagcgcgaagcttacgcagctgacatcacttacggtacgaacaacgaatacggctttgactacctgcgcgacaacatggcgttcagccctgaagaacgtgtacagcgtaaactgcactatgcgctggtggacgaagtggactccatcctgatcgatgaagcgcgtacaccgctgatcatttccggcccggcagaagacagcagcgaaatgtataaacgcgtgaataaaattattccgcacctgatccgtcaggaaaaagaagactccgaaaccttccagggcgaaggccacttcagcgtggacgaaaaatctcgccaggtgaacctgaccgaacgtggtctggtgctgattgaagaactgctggtgaaagagggcatcatggatgaaggggagtctctgtactctccggccaacatcatgctgatgcaccacgtaacggcggcgctgcgcgctcatgcgctgtttacccgtgacgtcgactacatcgttaaagatggtgaagttatcatcgttgacgaacacaccggtcgtaccatgcagggccgtcgctggtccgatggtctgcaccaggctgtggaagcgaaagaaggtgtgcagatccagaacgaaaaccaaacgctggctagcatcaccttccagaactacttccgtctgtatgaaaaactggcggggatgaccggtactgctgataccgaagctttcgaatttagcagtatctacaagctggataccgtcgttgttccgaccaaccgtccaatgattcgtaaagatctgccggacctggtctacatgactgaagcggaaaaaattcaggcgatcattgaagatatcaaagaacgtactgcgaaaggccagccggtgctggtgggtactatctccatcgaaaaaagcgagctggtgagtaacgaactgaccaaagccggtattaagcacaacgtcctgaacgccaaattccacgccaacgaagcggcgattgttgctcaggcaggttatccggctgcggtgactatcgcgaccaatatggcgggtcgtggtacagatattgtgctcggtggtagctggcaggcagaagttgccgcgctggaaaatccgaccgcagagcaaattgaaaaaattaaagccgactggcaggtacgtcacgatgcggtactggaagcaggtggcctgcatatcatcggtaccgagcgtcacgaatcccgtcgtatcgataaccagttgcgcggtcgttctggtcgtcagggggatgctggttcttcccgtttctacctgagcatggaagatgcgctgatgcgtatttttgcttccgaccgagtatccggcatgatgcgtaaactgggtatgaagccaggcgaagccattgaacacccgtgggtgactaaagcgattgccaacgcccagcgtaaagttgaaagccgtaacttcgacattcgtaagcaactgctggaatatgatgacgtggctaacgatcagcgtcgcgccatttactcccagcgtaacgaactgttggatgtcagcgatgtgagcgaaaccattaacagcattcgtgaagatgtgttcaaagcgaccattgatgcctacattccaccacagagcctggaagaaatgtgggatattccggggctgcaggaacgtctgaagaacgatttcgacctcgatttgccaattgccgagtggctggataaagaaccagaactgcatgaagagacgctgcgtgagcgcattctggcgcagtccatcgaagtgtatcagcgtaaagaagaagtggttggtgctgagatgatgcgtcacttcgagaaaggcgtcatgctgcaaacgcttgactccctgtggaaagagcacctggcagcgatggactatctgcgtcagggtatccacctgcgtggctacgcacagaaagatccgaagcaggaatacaaacgtgaaagcttctccatgtttgcagcgatgctggagagcttgaaatatgaagttatcagtacgctgagcaaagttcaggtacgtatgcctgaagaggttgaggagctggaacaacagcgtcgtatggaagccgagcgtttagcgcaaatgcagcagcttagccatcaggatgacgactctgcagccgcagctgcactggcggcgcaaaccggagagcgcaaagtaggacgtaacgatccttgcccgtgcggttctggtaaaaaatacaagcagtgccatggccgcctgcaataaaagctaactgttgaagtaaaaggcgcaggattctgcgccttttttataggtttaagacaatgaaaaagctgcaaattgcggtaggtattattcgcaacgagaacaatgaaatctttataacgcgtcgcgcagcagatgcgcacatggcgaataaactggagtttcccggcggtaaaattgaaatgggtgaaacgccggaacaggcggtggtgcgtgaacttcaggaagaagtcgggattaccccccaacattttagcctatttgaaaaactggaatatgaattcccggacaggcatataacactgtggttttggctggtcgaacgctgggaaggggagccgtggggtaaagaagggcaacccggtgagtggatgagcctggtcggtcttaatgccgatgattttccgccagccaatgaaccggtaattgcgaagcttaaacgtctgtaagtcagataaggcgttttcgccgcatccgacattcgcacacgatgcctgatgcgacgctggcgcgtcttatcaggcctaaagggatttctaactcattgataaatttgtttttgtaggtcggataaggcgttcacgccgcatccgacatttgcacaagatgcctgatgcgacgctgtccgcgtcttatcaggcctacgtgcggcatcagacaaatgtcactgctttggttcttcgctccagtcatcgctttcggaaagatcgccactgctggggattcgtttttcttcagcagcccattctccgaggtcgatcagctgacaacgtttggagcaaaatggccgaaacgggctgatttcaccccacaccaccgttttcccgcaggttgggcaattcaccgtaatagtttcactcatttttactccttagcaacaggccagttcgaaatccagacgttccggtacctgtccgttttcagtgtccagcggcataaaacgaatggcaaaacggctcttatgtccggaaatttgcggataaagctgactatcgaggctcagattcaggcgcagcaagtcggcatcgccaccgttatcctgataaaaaccattcaggctggtttgtttacggaagggggcgctctggcgaattaaatccagcaccatggtaagtgcctgggtgagcgggttcaggctggcaatccaggtttctacctggctgtcgcgctgcgcctggggtagatgcagccaaatgtgcaatgtaggtaaatcaaagctgcaacagccgcctgggatgctcagtcgctgacgcaccagagcaatcaaacgatcttcacgcagaaattgcccgatacgcggcgcggaaattaatacgctccccgccgcttttaactgctgaattaatgcttcaatacggctctggtccacgccaggcacgccaatccaggtctggagtttacgttgctgccggtcaagttctttcaacagctcagtgcggacttcgccgcgctcgaaaacatccagtaattcactgacattacggaagaaatgcagcgcgccagcgtggtcaacgatgggtaaattaacggtgagttgctgaatcaaaaactcaatgcgcagccatgtacgcattttttcatttagtggatgttcaaaaaggacctgggtctgcattacggtttttcctgactgacaaactggctcgcaagctgcaaatagtgtgcgtgcaggcgggcaacatcgcttgcgatagcatccggtgcgccgttattatcaatgacgtcatctgccacggcaaggcgggcttcgcgcgttgcctgagcagcaaggatttgttcgacatgctcgcgagttacatcatcgcgctgcatggtgcgcttaagttgcgtttctgggctgacatccaccacaagcactcgattcgcttttttatacagactgttttctaccagcaatggcacaacccacagtacatagggggaagtagcttgctggatctggtgttgcgtctcttgctgaatcagcggatgcagcagggcgttaagccagtttttctcttccgggttggcgaagatccgctcgcgcaaggcccggcgctgcaatgttccatcagcagcaatcatgttagcgccaaagtgatcagcaatggcatgtagcgcaggtgcacctggttcaaccacctgacgcgcaataatatcggcatcaatgacgttaattccgagatcagcaaacgcattggcaacggtactcttgccactgccaatgcctcccgttaaggcaactatatacctcataatttatattcccgggaattcatcatgattatcaaaacgttaaaaatgagtgcacgaaagcgaaattgatgaaacgttcgctcactatttaccaggtaaatttatgggattgtagcgtaaaaaaagacaatttcgcagtcttgcgccgcattgattagtgcgtatgatagcgtcactggagttgcgctcttacccttatagccattaaccccaggaatccgcacatgcgtattgaagaagatctgaagttaggttttaaagacgttctcatccgccctaaacgctccactcttaaaagccgttccgatgttgaactggaacgtcaattcaccttcaaacatagtggtcagagctggtccggcgtgccgattatcgccgcaaatatggacaccgtaggcacattttctatggcctctgcgctggcttcttttgatattttgactgctgtgcataaacactattctgtcgaagagtggcaagcgtttatcaacaattcttccgctgatgtgctgaaacatgtgatggtttctaccggtacgtctgatgcggatttcgaaaaaactaaacagattctcgacctgaacccggcattaaacttcgtttgtattgacgtggcgaatggttattccgaacacttcgtgcagttcgttgcgaaagcgcgtgaagcgtggccgaccaaaaccatttgtgctggtaacgtagtgactggtgaaatgtgtgaggagcttatcctcagtggtgccgatatcgttaaagttggcattggcccaggttctgtttgtacaactcgcgtcaaaacaggcgtcggttatccgcaactttctgcggtaatcgaatgtgccgatgctgcgcacggtctgggcggaatgatcgtcagcgatggtggctgcaccacgccgggcgatgtggcgaaagcctttggcggcggtgccgatttcgtcatgcttggcggcatgctggcgggccacgaagagagcggcggtcgcatcgttgaggagaacggcgagaaatttatgctgttctacggcatgagctccgagtctgcgatgaaacgtcacgttggcggcgttgcggaatatcgcgcagcagaaggtaaaaccgttaagctgccgctgcgaggcccggttgaaaataccgcgcgagatattttgggcggcctgcgtagtgcttgtacatacgttggggctagtcgcctgaaagagctgaccaagcgcaccacgtttattcgtgtgcaggaacaagaaaaccgcatcttcaacaacctgtaatctcccaacgctggcgtggagcaacacgccagcgttatcccatcccactcatcgcatcgcctaaatggaaaattggcagatacattgccaccaccagcgtaccaataattcctcccgttatgatcagcaacgccggttccagtaaggctgcgaggttatccgccagcgccattgtgttttcccgatgatgatgggcgaggttgtctaacatgagatccagagagccggatgcctctcctgttctcactaattgcaaacagagcgggctaaactcaccggtattttttagcgccagccagatgggttgaccgttactgatatcgtgctggatttgtgtcagaagttgcacccagtacgggcagcgcattgtttctctgacgctctctacgccctgtaaaaaagtaatgcctgcactttgtgtcagcgccagaatcgtaaagatctgcgtgagtttttgtccccgcatcagactacccataatcgggatgcgtaacagcaatttctgccgcactataagccaggtcggtcggcgcatcagcaacttattggctatcgccagcagaaagccgaacaacaccagcagccagctccattcgccactaaagtctgccagcgtcatgatcccctgcgttagtgccggtagtggggtgttgaaggtcttatagatagcggcaaactccggcagaacaaaatgcagcattgccacaaccaccatgattgccatcgctaaaatgatgatgggataacgtaacgcacttttcactttgtcggtcaactgacgctgggctttttgctgacgcgccagttcaaagcagcattcatccagcttaccggtcagttcacccgtgcggatcatcgcctgatagagcggcggaaatacctcactccagggtaataaggcattggaaaaagcaatgccctgttcgagatcgtgcgccaggctttgcagcaacgcttgccattgcttactgggatgctgttccgccagcagagccagcccttcagaaagcgttaaccctgctttgagtagcgtcgccagttgatgaatgacttccgcgcttttatctcctcgccactgcgcagaattgatggcgattcgcttcaggcttagtggggtaaccatctgttgctgtagtgccataagcagtaaagtacggctctctgcccatagcatcccatcttgcgcattgccgtcgccggttatgccatgccagcgccagagttgcttactcgccatgcggcatcctcagtacgcggattaactcttcaaaggtggttaagccttgctctacggccaggcagccgttttcaaaaagcgtacgcatacccgcctgtcgtgcgtgcgtttccaggctttcaacgtcggtattagcggaaataagctgacgaatgaccggcgttatgggcagaacttcaaataaggccgtacgaccataaaaaccgtggtagcaatgtacacaaccgggtgcctgccagtggggcagcgggcttggccatacattgtctggaatgtggatgggctccccttgctgccggcgacaatgtgggcaaagtttgcgtaccagacgctgggctattaccagcgtaagcgcgctacttagcatccagcgggcgacccccatttgctgtaaacgtaccagcgtttcgcaggtggaattagtgtgtagggtagacaacaccaggtgaccagtttgcgccgctttaatagcgatctctgctgtttcgccatcgcggatctctccgatcatgatgacgtcaggatcctggcgcaataacgcacgcaaaacgccctgaaaggtgagtccggcacgcggatggatttgcgtctggtttagtccggctatggggatctcaactggatcttcgacgctacaaatattaatgtcagcggtattcagcttttgcagggcactataaagcgtgaccgttttgccgctgccggtagggccagttaccagcaccagtccctgtggttgttgcaaggcatgagcaaagtccgccagttgtaacggctgcattccaagcgtgttgacatccagtgcctgacccacctgctgtaacaaccttaataccaccttttcaccaccccgacatggtaaggtcgcaatacgaaaactgacggcgtttcctgccagttcgacagtgaattgcccgtcctgcggcaggcgatgttccgcaatatccaggtttcccagcacttttaatctggcggttaatgcgactccggcatccggactaacatccggtaaaggatgcaatacgccgtcgatacgcaagcggatgcggtaggcattgtccgctggttcgatatgaatatcagacgcgcgttgttccagcgcagattgtaacgttcgagttagcaactctgctttgggctgatgcttctcctgaacagctacgggcagtgtctgttgtgtgcgactggcgtgaccttccatttgttggcgcgtccagcaggtgatctcaatacgtttggtggtagcgaaatgcaatgcgtccagtagctcatggctaggtgcatcgactaccgcaacatgaaccacctcttcgctggcatccagcaagactccatgataacgcagacacagggcagtgagctgtggaatattcattgccgctccttagttggcgtcatcaaagcggaagacatcttcgcaggcttgctgcaatgcgctgtcactttgaatattgcagttgcgcgtccagccggtgacgccgtttgcgttatcccaacccggtgtcatgacgacgcttagcccattgagactttcttgcccggtcaggctcaccacgccctttgccacactcatggcactaacatagcgggtggtggtagggctgggaatgccattgctgccaccgtcgcaggtatctaatccaccatgttccagcgcgcacaactctacggcggtacggtaaggcacaaaggtttgtagcatgtcggtgagtgcggctttgcgcaggtagttttgataagcgggaataccaatggcgcttaaaatggcaatgatgccaataaccaccatcagttcgataagtgtaaaaccgcgttgcttgtccatctgtttcgctccttgatttggttggcgctactttggcaaacgccatcagcacaggcgaggggcaaaaaacgaaacgggaaagcagattccgaggttttttatttcgttgcagcgaaagacaagaaatttgcgaggcgttacgaagaaagttggggaaggggagattatccgcccgcgatggagcggataaatctgtcaactattagcgaaaacgcatactaaggtcgagtgcttgtacgtgtttagttagcgcaccgacggagataaagtccacgcccgtttcggcaaattcacgcagtgttttgtcagtgacgttgccagacacttccagtagcgccttgccgttggtgcgtttgacggcttcgcgcatctgttctgtttcgaagttatccagcatgatgatatcggctcctgctttcagggcttcatcaagttcttccagattctctacttcgacttctactggcgcatccgggtgcagccaggacgctttttcgaccgcctggcgcacactgccggaggcaataatatggttttctttgatcaggaaggcatcagaaagccccagacggtgattcgctccgccgccgcaaagtaccgcgtatttcagagcactacgcaggccgggtaaggttttgcgcgtatccaacaactgcgtgttggtgccttccagcaattcgacatagtggcgtaccttactggcaactccactaagggtttgcacaaaattaagcgcagtgcgttcgcccgttaacagcacgcgggatgggccttcaagttcgaacaaggattgattggcattgatgacatcgccgtcatccacatgccagattatggtgacatcgtcgcctgccagttgaataaacacctcttcaacccagcgtttgccgcaaaagacgccattctcgcgggtgatcaccgtggcatgagagcgagaattttccggtaaaagttttgccgtaatatcattgttggcatcgactgttccgcctaaatcttcccgcagcgcctgggccaccgcgccggggatatcgagattaatgcgttccagcagctcgtcacgtcgggtgtcagggttatagcggcgaggcggcatgttaaaactccagatagctaacgaatcataaggtagaaacatgctactctgaaccgggtattagcaccacatataaggagatcctgcatgttgttagaacaggggtggctggttggcgcgcgccgcgttcccagtccacattacgattgccgcccggatgacgaaacacccaccctgctggtggtgcacaatattagcctgccgccaggcgagtttggcggtccgtggatcgacgcattattcactggaactattgatccgcaggcacatcctttctttgctgagatcgcccatttgcgcgtctccgctcactgtttgattcgccgtgatggtgaaatagtccagtatgttcctttcgataaacgtgcatggcatgcgggagcctctcagtatcaggggcgcgaacgctgcaatgatttttctattgggattgagcttgaaggcaccgatacgctggcgtataccgatgcgcagtatcaacagcttgcggcggttacgcgggcactgattgattgctatccggatatcgctaaaaacatgacgggccattgtgatattgcgccggatcggaaaaccgatcccggtcctgcatttgattgggcacggtttcgtgtgctggtcagcaaggagacaacatgacgctatttacaaccttactggtgttaattttcgagcgcctgtttaagttgggcgagcactggcagcttgatcatcgtcttgaagcgttctttcggcgggtgaaacatttttctctcgggcgcacgttaggcatgaccattattgcgatgggcgtgacttttttactgttacgcgcattgcagggagtattgttcaacgttcccacgctactggtgtggctgctgattggtttgctgtgtattggcgcaggtaaagttcgtcttcattatcatgcttatctgacagctgctagtcgtaatgatagccatgcccgtgccacgatggctggcgaactcaccatgattcacggcgtcccggcaggctgcgacgaacgtgagtatttgcgtgagctgcaaaatgcattgctgtggattaactttcgtttttatcttgcaccgctgttctggctgattgtggggggaacctggggacccgttacgctgatggggtatgcgtttttgcgtgcatggcaatactggctggcgcgatatcagacgccgcatcatcgtttacagtccggcattgatgccgtgcttcatgtactggattgggtgccggttcgtcttgcgggtgtggtatatgccttgatcggtcatggtgagaaagcgttaccggcctggtttgctagcctgggtgatttccatactagccagtatcaggtgttaacgcgtctggcgcagttctctctggcgcgtgaaccgcatgtcgataaggtggagacgccgaaggcagcggttagtatggcgaagaaaaccagcttcgtggtcgtggtggtgattgcactactgacgatttacggggcgttggtgtaaagattattgccctcaccctgtacgggtgagggcgtagagagattaatgcgcttttacggctttggcggttttctctttaaacagatagccgatacctaacacgatcagccataccgggatcaggtatacgctaatcgccattcctggggtcatcagcataatcaccagtaccgccgccataaacagcaggcagatccagttacccagcggataaagcagagcagggaagcgagttaccacgccttgttcctgcttggcgcgacggaatttcatatgcgccaggctaatcatcgcccagttgattaccagtgcagataccaccagcgccattaacagtccgaaagcggactctggggcaaggtagttaatcagtacgcacaacgccgttaccagtgcagacaccagaatggtatttactggtacaccacgtttatcgacagacgccagcgcttttggcgcattaccctgttgtgccagaccaaacagcatacggctgttgcaatatacgcagctgttgtacacggagagcgccgcagtcagtaccacgatgttcagcgcattcgccacaaaggtatcgcctaactcgtggaagatcagcacaaacggactggtatcggcggtaacgcgggtccacggcatcagactgagcagaacggctaagctaccaatatagaaaatcaggatgcggtagataacctggttagttgctttcggtatactttgctccgggttatcagcttctgctgcggtgatccccaccagttccagaccaccgaagctgaacatgataatcgccatcatcatcaccagcccggtgaagccgtgcggcaggaaaccaccctgatcccacaggttgctaacggtcgcctgcgggccgccgttgccactgaatagcagccagccgccgaagatgatcatcgctaccaccgcgataactttgataatggcaaaccagaactccatctcgccaaacactttaacgttggtcaggttgatggcgttaatcaccacaaagaatacggcggcagaaacccaggtggggatttccggataccagaactgaatgtatttacccacggcagtcagctcagccatggcaactaaaacgtacagtacccagtagttccagccagaggcgaaaccggcaaaactgccccagtatttataagcaaagtggctaaaggagcctgcgacaggttcttcgaccaccatttcacccagctgacgcatgatcagaaaggcgataaaaccagcaatggcgtaacccaggataatccctggccctgcggactgtattacggaggcgctacccaggaataacccggtccctatcgcgccacccagcgcgataagctgaatatggcggtttttaaggccgcgctttagctgctcgccgtgctgttgaccttccatcatgaaacctcgtgcggtggttgtttttttgatctacgcagtgatgcgtgtgtaagtttgcaattccgtttgttgtattaatttgtttacatcaaagaagtttgaattgttacaaaaagacttccgtcagatcaagaataatggtatgcggcagcgaatgcacccgctttatgcatggttgaagatgagttgcttaaaaagaaaccgtttgtaaagctcagcctcaacccctctcaatatgtagaatgaatttaaattcgttttaattgaattaaaaatcacaaaattggtaagtgaatcggttcaattcggatttttatagtttaataatcgttaaaaaactcctttcctacgtaaagtctacatttgtgcatagttacaactttgaaacgttatatatgtcaagttgttaaaatgtgcacagtttcatgatttcaatcaaaacctgtatggacataaggtgaatactttgttactttagcgtcacagacatgaaattggtaagaccaattgacttcggcaagtggcttaagacaggaactcatggcctacagcaaaatccgccaaccaaaactctccgatgtgattgagcagcaactggagtttttgatcctcgaaggcactctccgcccgggcgaaaaactcccaccggaacgcgaactggcaaaacagtttgacgtctcccgtccctccttgcgtgaggcgattcaacgtctcgaagcgaagggcttgttgcttcgtcgccagggtggcggcacttttgtccagagcagcctatggcaaagcttcagcgatccgctggtggagctgctctccgaccatcctgagagtcagtatgacttgctcgaaacacgacacgccctggaaggtatcgccgcttattacgccgcgctgcgtagtaccgatgaagacaaggaacgcatccgtgaactccaccacgccatagagctggcgcagcagtctggcgatctggacgcggaaagtaacgccgtactccagtatcagattgccgtcaccgaagcggcccacaatgtggttctgcttcatctgctaaggtgtatggagccgatgttggcccagaatgtccgccagaacttcgaattgctctatagccgtcgcgagatgctgccgctggtgagtagtcaccgcacccgcatatttgaagcgattatggccggtaagccggaagaagcgcgcgaagcaagccatcgccatctggcctttatcgaagaaattttgctcgacagaagtcgtgaagagagccgccgtgagcgttctctgcgtcgtctggagcaacgaaagaattaatgatttttctggtaaaaattatccagaagatgttgtaaatcaagcgcatataaaagcgcggcaactaaacgtagaacctgtcttattgagctttccggcgagagttcaatgggacaggttccagaaaactcaacgttattagatagataaggaataacccatgagtgaacgtttcccaaatgacgtggatccgatcgaaactcgcgactggctccaggcgatcgaaagcgtcatccgtgaagaaggtgttgagcgtgctcagtatctgatcgaccaactgcttgctgaagcccgcaaaggcggtgtaaacgtagccgcaggcacaggtatcagcaactacatcaacaccatccccgttgaagaacaaccggagtatccgggtaatctggaactggaacgccgtattcgtagtgctatccgctggaacgccatcatgacggtgctgcgtgcgagcaaaaaagacctcgaactgggcggccatatggcgtccttccagtcttccgcaaccatttatgatgtgtgctttaaccacttcttccgtgcacgcaacgagcaggatggcggcgacctggtttacttccagggccacatctccccgggcgtgtacgctcgtgctttcctggaaggtcgtctgactcaggagcagctggataacttccgtcaggaagttcacggcaatggcctctcttcctatccgcacccgaaactgatgccggaattctggcagttcccgaccgtatctatgggtctgggtccgattggtgctatttaccaggctaaattcctgaaatatctggaacaccgtggcctgaaagatacctctaaacaaaccgtttacgcgttcctcggtgacggtgaaatggacgaaccggaatccaaaggtgcgatcaccatcgctacccgtgaaaaactggataacctggtcttcgttatcaactgtaacctgcagcgtcttgacggcccggtcaccggtaacggcaagatcatcaacgaactggaaggcatcttcgaaggtgctggctggaacgtgatcaaagtgatgtggggtagccgttgggatgaactgctgcgtaaggataccagcggtaaactgatccagctgatgaacgaaaccgttgacggcgactaccagaccttcaaaagcaaagatggtgcgtacgttcgtgaacacttcttcggtaaatatcctgaaaccgcagcactggttgcagactggactgacgagcagatctgggcactgaaccgtggtggtcacgatccgaagaaaatctacgctgcattcaagaaagcgcaggaaaccaaaggcaaagcgacagtaatccttgctcataccattaaaggttacggcatgggcgacgcggctgaaggtaaaaacatcgcgcaccaggttaagaaaatgaacatggacggtgtgcgtcatatccgcgaccgtttcaatgtgccggtgtctgatgcagatatcgaaaaactgccgtacatcaccttcccggaaggttctgaagagcatacctatctgcacgctcagcgtcagaaactgcacggttatctgccaagccgtcagccgaacttcaccgagaagcttgagctgccgagcctgcaagacttcggcgcgctgttggaagagcagagcaaagagatctctaccactatcgctttcgttcgtgctctgaacgtgatgctgaagaacaagagcatcaaagatcgtctggtaccgatcatcgccgacgaagcgcgtactttcggtatggaaggtctgttccgtcagattggtatttacagcccgaacggtcagcagtacaccccgcaggaccgcgagcaggttgcttactataaagaagacgagaaaggtcagattctgcaggaagggatcaacgagctgggcgcaggttgttcctggctggcagcggcgacctcttacagcaccaacaatctgccgatgatcccgttctacatctattacagcatgttcggcttccagcgtattggcgatctgtgctgggcggctggcgaccagcaagcgcgtggcttcctgatcggcggtacttccggtcgtaccaccctgaacggcgaaggtctgcagcacgaagatggtcacagccacattcagagcctgactatcccgaactgtatctcttacgacccggcttacgcttacgaagttgctgtcatcatgcatgacggtctggagcgtatgtacggtgaaaaacaagagaacgtttactactacatcactacgctgaacgaaaactaccacatgccggcaatgccggaaggtgctgaggaaggtatccgtaaaggtatctacaaactcgaaactattgaaggtagcaaaggtaaagttcagctgctcggctccggttctatcctgcgtcacgtccgtgaagcagctgagatcctggcgaaagattacggcgtaggttctgacgtttatagcgtgacctccttcaccgagctggcgcgtgatggtcaggattgtgaacgctggaacatgctgcacccgctggaaactccgcgcgttccgtatatcgctcaggtgatgaacgacgctccggcagtggcatctaccgactatatgaaactgttcgctgagcaggtccgtacttacgtaccggctgacgactaccgcgtactgggtactgatggcttcggtcgttccgacagccgtgagaacctgcgtcaccacttcgaagttgatgcttcttatgtcgtggttgcggcgctgggcgaactggctaaacgtggcgaaatcgataagaaagtggttgctgacgcaatcgccaaattcaacatcgatgcagataaagttaacccgcgtctggcgtaagaggtaaaagaataatggctatcgaaatcaaagtaccggacatcggggctgatgaagttgaaatcaccgagatcctggtcaaagtgggcgacaaagttgaagccgaacagagcctgatcaccgtagaaggcgacaaagcctctatggaagttccgtctccgcaggcgggtatcgttaaagagatcaaagtctctgttggcgataaaacccagaccggcgcactgattatgattttcgattccgccgacggtgcagcagacgctgcacctgctcaggcagaagagaagaaagaagcagctccggcagcagcaccagcggctgcggcggcaaaagacgttaacgttccggatatcggcagcgacgaagttgaagtgaccgaaatcctggtgaaagttggcgataaagttgaagctgaacagagcctgatcaccgtagaaggcgacaaggcttctatggaagttccggctccgtttgctggcaccgtgaaagagatcaaagtgaacgtgggtgacaaagtgtctaccggcagcctgattatggtcttcgaagtcgcgggtgaagcaggcgcggcagctccggccgctaaacaggaagcagctccggcagcggcccctgcaccagcggctggcgtgaaagaagttaacgttccggatatcggcggtgacgaagttgaagtgactgaagtgatggtgaaagtgggcgacaaagttgccgctgaacagagtctgatcaccgtagaaggcgacaaagcttctatggaagttccggcgccgtttgcaggcgtcgtgaaggaactgaaagtcaacgttggcgataaagtgaaaactggcagcctgattatgatcttcgaagttgaaggcgcagcgcctgcggcagctcctgcgaaacaggaagcggcagcgccggcaccggcagcaaaagctgaagccccggcagcagcaccagctgcgaaagcggaaggcaaatctgaatttgctgaaaacgacgcttatgttcacgcgactccgctgatccgccgtctggcacgcgagtttggtgttaaccttgcgaaagtgaagggcactggccgtaaaggtcgtatcctgcgcgaagacgttcaggcttacgtgaaagaagctatcaaacgtgcagaagcagctccggcagcgactggcggtggtatccctggcatgctgccgtggccgaaggtggacttcagcaagtttggtgaaatcgaagaagtggaactgggccgcatccagaaaatctctggtgcgaacctgagccgtaactgggtaatgatcccgcatgttactcacttcgacaaaaccgatatcaccgagttggaagcgttccgtaaacagcagaacgaagaagcggcgaaacgtaagctggatgtgaagatcaccccggttgtcttcatcatgaaagccgttgctgcagctcttgagcagatgcctcgcttcaatagtagcctgagcgaagacggtcagcgtctgaccctgaagaaatacatcaacatcggtgtggcggtggataccccgaacggtctggttgttccggtattcaaagacgtcaacaagaaaggcatcatcgagctgtctcgcgagctgatgactatttctaagaaagcgcgtgacggtaagctgactgcgggcgaaatgcagggcggttgcttcaccatctccagcatcggcggcctgggtactacccacttcgcgccgattgtgaacgcgccggaagtggctatcctcggcgtttccaagtccgcgatggagccggtgtggaatggtaaagagttcgtgccgcgtctgatgctgccgatttctctctccttcgaccaccgcgtgatcgacggtgctgatggtgcccgtttcattaccatcattaacaacacgctgtctgacattcgccgtctggtgatgtaagtaaaagagccggcccaacggccggcttttttctggtaatctcatgaatgtattgaggttattagcgaatagacaaatcggttgccgtttgttgtttaaaaattgttaacaattttgtaaaataccgacggatagaacgacccggtggtggttagggtattacttcacataccctatggatttctgggtgcagcaaggtagcaagcgccagaatccccaggagcttacataagtaagtgactggggtgagggcgtgaagctaacgccgctgcggcctgaaagacgacgggtatgaccgccggagataaatatatagaggtcatgatgagtactgaaatcaaaactcaggtcgtggtacttggggcaggccccgcaggttactccgctgccttccgttgcgctgatttaggtctggaaaccgtaatcgtagaacgttacaacacccttggcggtgtttgcctgaacgtcggctgtatcccttctaaagcactgctgcacgtagcaaaagttatcgaagaagccaaagcgctggctgaacacggtatcgtcttcggcgaaccgaaaaccgatatcgacaagattcgtacctggaaagagaaagtgatcaatcagctgaccggtggtctggctggtatggcgaaaggccgcaaagtcaaagtggtcaacggtctgggtaaattcaccggggctaacaccctggaagttgaaggtgagaacggcaaaaccgtgatcaacttcgacaacgcgatcattgcagcgggttctcgcccgatccaactgccgtttattccgcatgaagatccgcgtatctgggactccactgacgcgctggaactgaaagaagtaccagaacgcctgctggtaatgggtggcggtatcatcggtctggaaatgggcaccgtttaccacgcgctgggtagtcagattgacgtggttgaaatgttcgaccaggttatcccggcagctgacaaagacatcgttaaagtcttcaccaagcgtatcagcaagaaattcaacctgatgctggaaaccaaagttaccgccgttgaagcgaaagaagacggcatttatgtgacgatggaaggcaaaaaagcacccgctgaaccgcagcgttacgacgccgtgctggtagcgattggtcgtgtgccgaacggtaaaaacctcgacgcaggcaaagcaggcgtggaagttgacgaccgtggtttcatccgcgttgacaaacagctgcgtaccaacgtaccgcacatctttgctatcggcgatatcgtcggtcaaccgatgctggcacacaaaggtgttcacgaaggtcacgttgccgctgaagttatcgccggtaagaaacactacttcgatccgaaagttatcccgtccatcgcctataccgaaccagaagttgcatgggtgggtctgactgagaaagaagcgaaagagaaaggcatcagctatgaaaccgccaccttcccgtgggctgcttctggtcgtgctatcgcttccgactgcgcagacggtatgaccaagctgattttcgacaaagaatctcaccgtgtgatcggtggtgcgattgtcggtactaacggcggcgagctgctgggtgaaatcggcctggcaatcgaaatgggttgtgatgctgaagacatcgcactgaccatccacgcgcacccgactctgcacgagtctgtgggcctggcggcagaagtgttcgaaggtagcattaccgacctgccgaacccgaaagcgaagaagaagtaatttttcgtttgccggaacatccggcaattaaaaaagcggctaaccacgccgctttttttacgtctgcaatttacctttccagtcttcttgctccacgttcagagagacgttcgcatactgcactccgttgctcgttattcagcctgacagtatggttactgtcgtttagacgttgtgggcggctctcctgaactttctcccgaaaaacctgacgttgttcaggacttgcgctttgaacacgctggcgggcgttatcacgttgctgttgattcagtgggcgctgctgtactttttccttaaacacctggcgctgctctggacttgcggactgaatacgctcacgcgctgcgtctcttcgctgctggttctgcgggttagtctgcattttctcgcgaaccgcctggcgctgctcagggctggcggactgaatgcgctcacgcgctgcctctcttcgctgctggatcttcgggttagtctgcattctctcgcgaactgcctggcgctgctcagggctggcggactgataacgctgacgagcggcgtccttttgttgctgggtcagtggttggcgacggctgaagtcgtggaagtcgtcatagctcccatagtgttcagcttcattaaaccgctgtgccgctgcctgacgttgggtatctcgtgtaatgactggtgcggcgtgtgttcgttgctgaaactgatttgctgccgcctgacgctggctgtcgcgcgttggggcaggtaattgcgtggcgctcattccgccgttgacatcggtttgatgaaaccgctttgccatatcctgatcatgatagggcacaccattacggtagtttggattgtgccgccatgccatattcttatcagtaagatgctcaccggtgatacggttgaaattgttgacgtcgatattgatgttgtcgccgttgtgttgccagccattaccgtcacgatgaccgccatcgtggtgatgataatcatcattgtcatgatgatgatggtcatgatcgtcgtcgtcccagtcgatgctgctgaatagtgcgtacgtggtagcaacgcccatgctatagccgaatccgcgtacaaagctgtcaacaaacggttctccggctggtggtggcagataaaccggcggatacgcagtattggcccagttcccgtaaaccacggttgggttgtagttgggaatatagaccacatcaggattggcgggctcaatggaaatgacggttgttgccggctctgtaatgacggggttggcagttaaaactgtattggatggtatgacgggtgccgtgactgtctgttttaccggtacagctttcttcgttgtggtaataactttctgttcggtactactcttcaggctgccggtttgttgcgccagttgccgcaatcgctgtacgctgtccatcacgtcctgcggctgggccagaaaagcatcgcccaggttttgcacccattgcgggttttcgcccatcaatgccatcaattgtggaaaggccaccagacttttaacgctggcgtcccacggctggtcagataccgcctgaatagcagcatcgccttgtttaagtggattatcgtggctccattgcactgcttgagcaacgtttgtcggataggtacttgccatcagcacctggctaagtagggcgtcgggatacagcgcgacgggcgcgacccattgatctatttgtgcagtgctgaatgcggatttgacgacggcgggtgttacgggaggtgcggaaaccgttgcaggaaacgtaaccgcggcagcgtcagacacagccagttgtgtgctttgcggttccacaggcgcttccactgtgcggctttttatatatagcccggtagaggcggcacaaagcccggcactgcaaattagcgccagcacatggggtttaaacggcaaagtcattttcataattcggatctcaaggaaatcgcaatggtcggcgaactgccacccgcaggtgctgtgaatccgagtataaagaggcggtagtttaaattttgactaatcttgggattcgttgagaaaggtgattatcaccatgcgaattaacgaagtttttacggagggaaacaatctctagaccatccttaacgattcagccacttttttatgttgcttttttgtaaacagattaacacctcgtcaaaatcctgctattctgcccgttgcggtactgggcatttaccctacaaactgctgtctcacaggagcgtgaagagaatcgcctgccgcactatgacaatgagagcgaggagaaccgtcgtgctagaagaataccgtaagcacgtagctgagcgtgccgctgaggggattgcgcccaaacccctggatgcaaaccaaatggccgcacttgtagagctgctgaaaaacccgcccgcgggcgaagaagaattcctgttagatctgttaaccaaccgtgttcccccaggcgtcgatgaagccgcctatgtcaaagcaggcttcctggctgctatcgcgaaaggcgaagccaaatcccctctgctgactccggaaaaagccatcgaactgctgggcaccatgcagggtggttacaacattcatccgctgatcgacgcgctggatgatgccaaactggcacctattgctgccaaagcactttctcacacgctgctgatgttcgataacttctatgacgtagaagagaaagcgaaagcaggcaacgaatatgcgaagcaggttatgcagtcctgggcggatgccgaatggttcctgaatcgcccggcgctggctgaaaaactgaccgttactgtcttcaaagtcactggcgaaactaacaccgatgacctttctccggcaccggatgcgtggagtcgcccggatatcccactgcacgcgctggcgatgctgaaaaacgcccgtgaaggtattgagccagaccagcctggtgttgttggtccgatcaagcaaatcgaagctctgcaacagaaaggtttcccgctggcgtacgtcggtgacgttgtgggtacgggttctagccgtaaatccgccactaactccgttctgtggtttatgggcgatgatattccacatgtgccgaacaaacgcggcggtggtttgtgcctcggcggtaaaattgcacccatcttctttaacacgatggaagacgcgggtgcactgccaatcgaagtcgacgtctctaacctgaacatgggcgacgtgattgacgtttacccgtacaaaggtgaagtgcgtaaccacgaaaccggcgaactgctggcgaccttcgaactgaaaaccgacgtgctgattgatgaagtgcgtgctggtggccgtattccgctgattatcgggcgtggcctgaccaccaaagcgcgtgaagcacttggtctgccgcacagtgatgtgttccgtcaggcgaaagatgtcgctgagagcgatcgcggcttcagcctggcgcaaaaaatggtaggccgtgcctgtggcgtgaaaggcattcgtccgggcgcgtactgtgaaccgaaaatgacttctgtaggttcccaggacaccaccggcccgatgacccgtgatgaactgaaagacctggcgtgcctgggcttcagcgctgacctggtgatgcagtctttctgccacaccgcggcgtatccgaagccagttgacgtgaacacgcaccacacgctgccggacttcattatgaaccgtggcggtgtgagcctgcgtccgggtgacggcgtcattcactcctggctgaaccgtatgctgctgccggataccgtcggtaccggtggtgactcccatacccgtttcccgatcggtatctctttcccggcgggttctggtctggtggcgtttgctgccgcaactggcgtaatgccgcttgatatgccggaatccgttctggtgcgcttcaaaggcaaaatgcagccgggcatcaccctgcgcgatctggtacacgctattccgctgtatgcgatcaaacaaggtctgctgaccgttgagaagaaaggcaagaaaaacatcttctctggccgcatcctggaaattgaaggtctgccggatctgaaagttgagcaggcctttgagctaaccgatgcgtccgccgagcgttctgccgctggttgtaccatcaagctgaacaaagaaccgatcatcgaatacctgaactctaacatcgtcctgctgaagtggatgatcgcggaaggttacggcgatcgtcgtaccctggaacgtcgtattcagggcatggaaaaatggctggcgaatcctgagctgctggaagccgatgcagatgcggaatacgcggcagtgatcgacatcgatctggcggatattaaagagccaatcctgtgtgctccgaacgacccggatgacgcgcgtccgctgtctgcggtacagggtgagaagatcgacgaagtgtttatcggttcctgcatgaccaacatcggtcacttccgtgctgcgggtaaactgctggatgcgcataaaggtcagttgccgacccgcctgtgggtggcaccgccaacccgtatggacgccgcacagttgaccgaagaaggctactacagcgtcttcggtaagagtggtgcgcgtatcgagatccctggctgttccctgtgtatgggtaaccaggcgcgtgtggcggacggtgcaacggtggtttccacctctacccgtaacttcccgaaccgtctgggtactggcgcgaatgtcttcctggcttctgcggaactggcggctgttgcggcgctgattggcaaactgccgacgccggaagagtaccagacctacgtggcgcaggtagataaaacagccgttgatacttaccgttatctgaacttcaaccagctttctcagtacaccgagaaagccgatggggtgattttccagactgcggtttaaaaagtcagcgcacgcgctgcgcataaacgacacaatgcccggtgaatgagattcccgggcatttttttatttctaaaccatcgccgttccgctgtttttctccggtaaggctgcgataattacatcaatggcgcaatgcgatttcggtgcattgccgggagcagaggaacacactatggattacgaatttctgcgcgatattaccggagtggtaaaggtgcgtatgtccatggggcatgaagtggtcgggcactggtttaatgaagaggtgaaagaaaacctggccttgcttgatgaagtggaacaagcagcgcacgcactgaaaggtagcgaacggtcctggcaacgggcagggcatgaatacaccctgtggatggacggtgaagaggtgatggttcgcgccaatcaactggaattcgctggcgatgaaatggaagaggggatgaactactacgacgaagaaagcctgagcctatgcggcgttgaggattttctgcaggtcgtggcggcttaccgcaatttcgtgcagcagaagtaaataaatctggcggagcctgggagctccgccagagccgttaaacagctggcatattgcgcccgtaataaatctcgcgcatttctttccacagcgcagcggtaatttcctggcgctcgctgtcggttaagtcttccggtttggtgtggaacatgtagtgcttaaggtcgaactctttaagcaacatcttggtatggaagatattttcctgatagacgttcacatccaccatgtcatacagcgccttcatatcgtcagacataaagttctgaatgctattaatctcatggtcgataaagtgcttcataccgttaatgtcgcgggtaaaaccgcgcacgcgataatcaatggttacgatatcggactcaagctggtggatcaggtaattcagcgccttcagcggagaaatcacgccgcaggtagagacttcaatatcggcgcggaaggtacataaaccgccttcaggatgactttccgggtaggtatgtacgcaaatatgacttttatcaagatgggcaacgaccgtttctggcagtgggccggggtgttctgttttgtcgatgagtttcgggtcaaccggttcttcactcaccagaatagtgacgctggcaccctgtggttcgtaatcctggcgggcgatgttaagaatattagccccgataatggaacaggtttcactcaggatttcggtcagacggttggcattatagagttcatcgatataagcaatataaccgtcgcgctcttcggcagttttggcgtagcagatatcgtaaatacaaaaactcagacttttggtcagattattaaagccatgcagtttcagttttttcaatttcttatcttctccttaggacggctgactagccagtgcgtcttgcagatactgaggtaaggcaaaagctgccgtatggattgccggattgtaataacggcatttcaggccagaggcgagaaaacgcgcctgaataatttcggtactgagatggcgtaaggcgtcgttatctgtcgcccatgcaaaagtcatgataccgccgtaataggtcgggatcgccgcctgataaaagccaacgtcgctgaagtaatggctgagtttgcgatggctgtcgatggcttcttcctgctgtaaaaagcagacgccgttttgtgcgacgaagataccgccaggattcaggcaacgtttgcagccttcataaaatgcgctagtgaaaaggctttcgccgggaccgataggatcggtgcagtcggagataatgacatcaaaggtctggctggtttgattaacgaaattgacgccatcgtcgatcaccagcttaaagcgcggatcgtcgtagctaccggcgttatggttgggtagatactgacggcagaagcttacgacacccgcatcgatttccaccatcgtgatactctcaacgtttttatgtcgggttacttcacgcagcatggcaccgtcgccgccgccgataatcagcacatgtttcgcgtgaccatgggccagtagcggaacatgggtcatcatctcatgatagataaactcgtcgcgctcggtggtttgtactacgccatccagcgccattacgcgaccaaatgcagcgttctcaaaaatgatcagatcctggtgatcggtcttttcatgatacagaacgttatctaccgcaaagtactgcccaaactggtcgtgtagcgtttcatgccactgttttttttcggccatgggttgatacctcctttgttaacacccgtaaaaaaagggcgcaacataatagctaacattgaccgcggatgcacggtcaatatttctacaaaaaggtatcagggattatttgacgtaggcaagcaggcttaaggaatcgcgggccagggctttgcattttttagcgacgggaatgccaatgccgctgagatcgcggtagctgtcttcaccgagggctttcatgtcgaaggtgtcgtaattactgaggtcccactggttttgctgagcgaaaaagaccagtgcgcgacgaatttgcccgttaggtaagttctggtaaccacaatcgttcttcagaaagacaaaaactgccgttaaatcggccatatcttcggcttcagactcgctgagcgcgtaactgtttgcgcagacggccatcaggctgccgaataacactgttctgaaaaacgtcttcattgcttctaccaggggcttaaagaagataaacgttagcacactgcgagcgaggcgacgaccattattgtcgattaaattgtgtctgcggcttgaccttcccgtaaggggaaggactatgctcaacgtttgattttgtttcgcctgcttaagaataaggaaataactatgcaacgtcgtgatttcttaaaatattccgtcgcgctgggtgtggctagcgctttgccgctgtggagccgcgcagtatttgcggcagaacgcccaacgttaccgatccctgatttgctcacgaccgatgcccgtaatcgcattcagttaactattggcgcaggccagtccacctttggcgggaaaactgcaactacctggggctataacggcaatctgctggggccggcggtgaaattacagcgcggcaaagcggtaacggttgatatctacaaccaactgacggaagagacaacgttgcactggcacgggctggaagtaccgggtgaagtcgacggcggcccgcagggaattattccgccaggtggcaagcgcagcgtgacgttgaccgttgatcaacctgccgctacctgctggttccatccgcatcagcacggcaaaaccgggcgacaggtggcgatggggctggctgggctggtggtgattgaagatgacgagatcctgaaattaatgctgccaaaacagtggggtatcgatgatgttccggtgatcgttcaggataagaaatttagcgccgacgggcagattgattatcaactggatgtgatgaccgccgccgtgggctggtttggcgatacgttgctgaccaacggtgcaatctacccgcaacacgctgccccgcgtggttggctgcgcctgcgtttgctcaatggctgtaatgcccgtagcctcaatttcgccaccagcgacaatcgcccgctgtatgtgattgccagcgacggtggtctgctacctgaaccagtgaaggtgagcgaactgccggtgctgatgggcgagcgttttgaagtgctggtggaggttaacgataacaaatcctttgacctggtgacgctgccggtcagccagatggggatggcgattgcgccgtttgataagcctcatccggtaatgcggattcagccgattgctattagtgcctccggtgctttgccagacacattaagtagcctgcctgcgttacctagcctggaagggctgacggtacgcaagctgcaactctctatggacccgatgctcgatatgatggggatgcagatgctaatggagaaatatggcgatcaggcgatggccgggatggatcacagccagatgatgggccatatggggcacggcaatatgaatcatatgaaccacggcgggaagttcgatttccaccatgccaacaaaatcaacggtcaggcgtttgatatgaacaagccgatgtttgcggcggcgaaagggcaatacgaacgttgggttatctctggcgtgggcgacatgatgctgcatccgttccatatccacggcacgcagttccgtatcttgagtgaaaatggcaaaccgccagcggctcatcgcgcgggctggaaagataccgttaaggtagaaggtaatgtcagcgaagtgctggtgaagtttaatcacgatgcaccgaaagaacatgcttatatggcgcactgccatctgctggagcatgaagatacggggatgatgttagggtttacggtataaaaagaccgtattcggaaatatgcccggatctctccgggcattaaactgatgacaaacgcaaatctgcctgatgcgctacgcttatcaggcctacgctagctgtgcaatccattgattttgcacaattttgtaggctggataaggcgttcacgccgcatccggcatgaacaacgcgcacgttgtcagcaatctgagcaagtcttacttcacatcatccggcagcgcataagccacaatatagtcgcccatcttcgtaccaaaactaccgtgaccgcctgcggagatcaccacatactgcttaccattcacttcataggtcattggcgtagcctgaccacccgctggtaaacgaccctgccacagtttttcaccgttgctcatgttgtaagcgcgcaggtagttatctgccgtagcggcgataaacagcacgttacccgccgtggagattggcccgcccagcatcggcatacccatattgaacggcaccggaaccggcatcgggaacggcatactgtcctgcggcgtaccaatacgtttcttccacaccacttcattagttttcagatccagcgcgctgatataaccccatgctggctgtttacatggcagaccaaatggactgaggaacgggttgagcgtgacaccatacggtacaccgtactgtggctgaatgccggattccgtacccgtgcctttggcatctttcggctgctccatcgggttgccaggaccacgcgggatcagtttgctaacaaacggcagtgccattgggttggcaatcgccacttcacgatttggatcaacggaaatcccgccccattcgaacatccccaggttacccgggaagaccagcgtaccctgttcagatggcggggtgaaaatgccttcatagcgcatctggtggaacatcacgcggcacaccagttggtcaaacatggtggctccccacatatccgcaccgctcaaatctttcgtcggacggaagctcagttcagaaaacggttgagttggggttacgtaatcgcctttcgctgcaccttggggaaccggtttttccggtgccggaaccaccagttcgccattacgacgatcgagcacaaaaatgttgccggttttcgccggagcgtaaataactggcactttctgaccattaacggtgatgtccgccagcgtcggctgtgccggaagatccatgtcccacaggtcgtggtgaacggtctggtagctccacgccagtttcccggtagtggcattcagcgccagaatgctgctggcataacgttcctgttccggtgtgcggttaccgccccagatatccggcgtggtcacgcccatcggcagatagaccagatccagcttcgcgtcataggccgctggtgcccaggagtttgggctgttaaaggtaaaggtgtgttcgtcagacgggattgcgttcggatctttcgcgccgggatcaaaagcccacagcagctccccggtgttgacatcaaaaccacggatcacgccagacgtttcgcgggtactgaagttatcggtaacactaccggccatcacgatggttttatcggtgataatcggtgggctagtcggttcatacagacccggtttggtgtctggcatattgctttgcagattgagcacgcctttattggcgaaggtttcgcacagtttgccgttttcagcgttaatcgcaatcagtcgaccatcattgaccggaagaatgatacgacgcgggcaatccgccatcacttccgggctagcggtttctgctttggcttcatgataagagacaccacggcaggttacgtgctggaaagactcgttggttttcagctcaggatcgtaatgccatttctctttgccgctggcggcatcaagcgcaaacaggcgctggtgagcggtacacaggtaaagggtgtcgcccactttaatcggcgtcacttcattggtgatttcacccggatcgttcggctgcttcacatcgccagtacggaacacccaggcttctttcagattatggacgttatcggcgttaatttgtttcagcgggctaaagcgttgaccttcctgattacgaccataggcaggccagtcctgatcggctacgggggagatagcttcagcaggtgtggcatcggcgcttaaggtgccgttgatctcctgcggatcgttaaatccggcccaggtcaggataccaccgctaatcagcagtgcgaccaccagtgcggcaactgcgccgctggcaggaatgaccaggcgacgccagacaaacggcaggatcagccagatgccgaagaagaccagaatgtcgctgcgcggagtcagcgcccagaagtcgaaaccaacttcccagacgccccaaatcatggtgccgagcagcagggctgcgtatagccaaagcgcggcgcgtttactgcgccacagcatccaggcgacgccgagcatcacaaggccagcgatagggtagtaccaggagccgccaatcgcgaccagccagcctccgccaatgagtagatacagcccgcaaagcgctgcaaaaagggctgttagcgtgacgagtaatcgtcggctgcctgtattgttaattgccataaagagacaccatttcaattcattaatattttagtagcaattaattataggttttaacatgtgtgatcgtcatcacaattcgagctttattaacagattccgcgaatgaatagttttactggtatactgcgtgtcttgcgctttgttgcggtgccaaaacctgcccgtgcgaagtgatttgtttttaaatcatatggttagagatatgaaacatactgtagaagtaatgatccccgaagcggagattaaagcgcgtatcgccgaactgggtcgtcagattactgagcgttacaaagacagcggcagcgatatggtgctggtgggtctgctgcgtggcagttttatgtttatggcggacctgtgccgtgaagttcaggtatctcatgaagtcgactttatgaccgcctccagctacggtagcggcatgtccaccacccgtgatgtgaaaatcctcaaagatctggatgaagatatccgtggcaaggacgtgctgattgttgaagatatcatcgacagcgggaatacactgagcaaagtgcgtgagatcttaagcctgcgcgaaccgaagagcctggcgatttgtacgctgctggataaaccgtcccgtcgtgaagtgaacgtcccggtagaatttatcggtttcagcatcccggatgagtttgtggtgggttacggcattgattacgcacagcgttaccgtcatctgccgtatatcggcaaagtgattctgctggacgagtaagtgtgaagttgccggatgtgttgcatccggcatggcatttttatttgtggttggcgtgtttcagcttgaggttggaaatcccgtgacggtaacgttgctcaagggtttcgcggttggtggcggtaacatccagatcacgcagcaagccgtcgtgaatgccgtaggcccagccgtgaatggtaactttctgcccgcgtttccacgcactttgcataatggtggagtggcccaggttatacacctgttccatgacgttcagttcacacaaggtatccagacggcgctcttgcggcatttcgccgagcaaactgctatgtttgaaccagatatcgcggatatgcagcagccagttgttgataagccccagttccgggttttcaactgcggcttgtacgccgccgcaaccgtagtggccacagataataatgtgttcaacttcgagtacatccactgcatactgaaccacggaaaggcagttcaggtcagtgtgaatgaccaggttagcaacattacggtgaacaaagagttcgcccggttcaagaccggttaaacgttctgcaggaacgcgactgtcggaacatccaatccatagaaagcgcggtttttgcgcttgtgccagtttctcaaaaaacccgggatcctcttccaccagcattttactccatagtgcattgttgctgatgagtgtatctatgtctttcatggaggttaacgacctgtaaccaaataattacgtttggctaatatagggcaactccgggacgatttaaaccacagataaagtgtaagaacgtaaggtaagtaaaaatttatgaccattgcactggaacttcaacagcttaaaaaaacctatccaggcggcgttcaggcgcttcgtgggatagatttgcaggtcgaagcgggtgatttttatgcgcttctcgggccgaacggggccgggaaaagcaccactatcggtattatcagctctctggtaaataaaacctccgggcgggtcagcgtatttggttacgatctcgagaaggatgtcgtgaacgctaaacgtcagttgggactggtgccgcaggaatttaacttcaacccgtttgaaaccgtgcagcaaattgtggtgaatcaggcagggtactacggcgtggagcgcaaagaagcgtacatccgcagcgaaaagtatcttaaacaactcgatctatggggaaaacgcaacgaacgtgcgcgtatgttatctggcgggatgaagcgccgtttaatgattgcccgtgcgttaatgcatgaacctaaactactgattctcgacgaaccgaccgcaggcgtggatattgaacttcgccgcagtatgtggggctttttgaaggatttaaacgacaaaggcaccaccatcattctcaccacacactacctggaagaagcagaaatgctgtgccgcaatatcggcattattcaacacggtgagctggtggaaaataccagcatgaaggcgctgctggcgaagctgaaaagcgaaacctttattctcgatctcgcaccgaaaagcccgttaccgaagctcgatggctatcagtatcgactggtcgataccgcgacgctggaagttgaagtgctgcgtgagcaggggatcaacagcgtatttacgcagttaagtgagcagggcattcaggtattaagtatgcgtaacaaagctaaccgtctggaagagctgtttgttagtctggttaatgaaaaacaaggagatcgcgcatgatgcatctttactgggtggcgctaaaaagcatctgggcgaaagagatccatcgctttatgcgtatctgggtgcagacgctggtgccgccagtcatcaccatgaccctttactttattatcttcggtaacctgattggtagccgtattggcgatatgcatggcttcagctatatgcagttcatcgtaccggggctgatcatgatgagcgtgatcaccaatgcctacgccaacgttgcgagtagtttttttggtgccaagttccagcgtaatattgaagagctgctggtagcgccggttccgactcacgtcattattgccggatatgtcggcggtggcgtggcgcgtggtctgtttgttggcattctggtgacggcaattagtctgttttttgtgccatttcaggtgcatagctgggtattcgttgccttaacgctggtgctcacggcggtgttgttctcccttgcgggtttgctgaacggtgtgtttgccaaaacgttcgatgacatcagcctggtgccaacctttgtgttaacgccactcacgtatttgggcggggtcttttacagtctgactttgttgccgccgttctggcaagggctgagccacctgaacccaatcgtttatatgatcagtggtttccgctacggcttcctcggtatcaatgatgttccgctggtcactacctttggcgtactggtggtctttattgtggcgttttatttgatctgttggagcctgatccaacgtggacgtggtttgcgtagctaaggctatttcctctcctctggatttgggggagaggagttttgacggctatcaccctttatcaacaatggtcagggtagactgattttcggctaaggaggaaggcgatgttaggttgggtaattacctgtcacgatgaccgggcgcaagagatactggatgcgctggagaaaaaacatggggcacttcttcagtgccgggccgtgaatttctggcgcggattaagctctaatatgctcagccgcatgatgtgcgatgctctgcatgaagcggactctggtgagggtgtcatcttcttaaccgatatagccggagcgccaccgtatcgcgtggctagtttattaagccacaaacactcccgttgcgaagtgatttctggtgtcacgttaccgttaattgaacagatgatggcttgccgtgaaaccatgaccagtagtgagtttcgcgagcgtattgtcgaactgggtgcgccggaggtgagtagtctttggcaccaacaacaaaaaaatccgcctttcgtcctcaaacataatttgtatgagtattaacccgcgattctgatggcgcttttgctacaataaaagcgttgtttcaccctcggttattttttcatgtacaaacaagctgttattctcctgctgatgctgtttaccgcaagtgtcagtgccgcgttacctgcccgttatatgcaaaccatcgaaaatgctgcggtctgggcgcaaattggtgacaagatggtgaccgtggggaatattcgggccggacaaatcattgccgtggagcccactgccgcaagttattacgcatttaattttggctttggcaaaggttttatcgataaaggtcatctcgagccggttcaggggcgacaaaaagttgaagacggtttgggcgacctcaacaagccgctgagtaatcagaacttagttacctggaaagatacgccggtctataacgcgccgagtgcgggaagtgcgccatttggggtactggcggacaatttgcgctacccgattttgcataaactgaaagacaggttaaatcaaacctggtatcagatccgtattggcgatcgactggcctatatcagcgcactggatgcccaacccgataatggcctgagcgtgctaacctatcaccatattctgcgcgacgaagaaaacacccgttttcgccatactagcacgaccacaagcgtacgcgctttcaataaccagatggcctggctgcgtgacaggggatacgcgacactgagcatggtgcagctggaaggctacgtgaagaataagatcaatctccctgcgcgagcggtggtgattacctttgatgatggcctcaagagcgtgagccgctatgcgtatcctgtgttgaaacaatatggcatgaaggcgacggcgtttattgttaccagtcgcatcaaacgtcacccgcagaagtggaacccaaaaagcctgcaatttatgagcgtttctgagcttaacgaaattcgcgatgtatttgatttccagagtcatacccattttttgcatcgggtagatggttatcgccgacccatattactgagccgtagtgagcacaatattctgtttgattttgcacgtagtcgccgcgctctggcgcaatttaatccgcatgtctggtatcttagctatccgtttggcggatttaatgacaacgccgtgaaggcagcaaacgatgccggatttcacctggcggtgacaaccatgaaaggcaaagtaaaaccgggggataatccgttgttactaaaacgactttatatcttaagaacggatagcctggagacgatgagccggctggtgagtaaccagccgcagggataacaatcaagcaacctgtaccggaatcgctttcgcggtacgtttcatttcattgtcgccttcaaaataggcgacgttgggtcgccaggtgcgagcttcttcatctggcatggtaacgaagctggcgatgatgacaatatcgccgacactggcgcagtgggccgccgcaccgttaacagaaataattctgctaccgcgttctgccgcgatggcataagtggagaaacgcttgccgttggtgacattccagatatcaatggcttcgttttcgagaataccggctgcgtcaagaaaatcctggtcaatggcgcaagaaccttcatagtgcaggtccgcatgagtcactttcacgcggtggagtttgccctgcagcatcgtgcgaatcataacttctacctttctaccctgtcgttaacgaagcaggcgatgcctgctttgaggaaattctcacgcagtattgcccgatttttgtttagtgtctactcatctgacggcatttgcgtcagcagtttgcgtaccgcgccgaagcgtgccatgtatcgcctgtaacgaattgatatttctctgaacgctgctcggtaaacaataaagaggtggctgacgatagcgcgccttgactggatactgccttcacgcaaagccacacggaagacagggaagatggatgcaccgagtaccacaccgcatgacgcggtatttaaacaatttttaatgcatgcggagacggctcgcgactttctggagatacatttgccagtggaattacgcgaactttgtgacctcaacacgcttcatttagagagcgggagtttcattgaagagagcctgaaaggacacagcacggacgtgctctattccgtgcaaatgcagggcaatcccggttatctgcatgttgtgattgaacaccaaagcaagccggataagaaaatggcctttcgcatgatgcgttattctatagccgccatgcaccggcatctggaggctgaccacgataagctgccgctggtggtgccgatactgttttatcagggcgaggccacaccttatccgctaagtatgtgctggtttgatatgttttacagcccggagctggcgcgacgcgtctataacagtcctttcccgctggtggatatcaccatcacaccggatgacgaaatcatgcaacatcggcggattgcgattctcgaactactgcaaaaacatattcgccagcgcgacttaatgttattgcttgagcaactggtcacgctgatcgacgaagggtacactagcggaagtcagttagttgccatgcaaaactatatgctgcaacgcggtcatactgaacaagcggatttgttttacggtgtgttgagagacagggaaacgggaggggagtctatgatgacgctggcgcagtggtttgaagagaaagggattgagaaggggattcagcagggaagacaggaagtaagtcaggaattcgcccagcgtcttctgagtaaaggaatgtctcgggaagacgttgcagagatggcaaatttacctcttgctgagattgataaggtaattaaccttatttaagttacctgtgttatgacagatgacgtggggtaaattaataactggcgccatcagccgtagcgccagttaagtattacgccagctcgaccattttgttgtcgatcaggcgagcatcgccaagccaggcggctaccagaattactgcccgtttgctggtttcagaaacttccagcaatgtgtcggcatcgcgaatctgaatatcatcggcgcggaagcctttttcattcagttcttgccccgcaatggtaataatttcatcgagatcccgttccccagcctgcaatttgtcagcaatgctacttaaaactttgtacagaccaggcgcaattttgcgttgttccgccgtcagataaccgttacgggaacttagcgccagaccgtctttggcgcgcataattggcacaccgacaatctcaatatcgaagcccatatcggcaaccattttgcggatcagcgccagttgctgaaaatctttttcaccgaagcaggcgatgtccggctggaccaggttgaacagcttgctgacaatagtgctaacgccgcgaaaatgtcccggacggctggcaccttccagcatggtgctaaggccaggaacgtcaacgtaagtgtgggtttcagtaccgttcgggtagatctcttttacgctaggggcgaaaactaaatccactttacgtttgtttagcttctcgcagtcctcctgcaaggtccgtggataacgagccagatcttccgggcggtcgaactgcatcgggttaacgaaaatactgacgacgaccacatcggcgcgggctttggcttcgtcgaccagcttcatatggccatcgtgcaggttacccatggtaggcaccagcgccacgcgcttgccttccatacgcaggcggcgaatttgctgacgcagcagcggcagggtttcgataattaacacaacgtgactccttaatggaaactgtgttcttcgcccggataaacgccggactccacttcagccatatactgccgcacagccgcgcggatgtcgcccgtttcggcgaggaaatttttagcgaatttaggaatgtgaccgccggtaataccaaaggcgtcgtgcatcacgaggatctgcccgtcagtgacgttgcctgcgccaatgccaataaccgggatcgccagtgcttcggtaatacgttttgccagttcaaccggcacgcattccagcaccagcagctgtgccccagcagcttctaaggctaatgcatcgctgagcagttgatcgcccgcttcatcgccgcgcccctgaactttgtagccaccgaaaatattcacactctgtggtgttaaacctaagtgaccacatacaggaacggcacgttcggtcagcatttgtacggtttctaccagccactcaccgccttcaattttgaccatgttagcaccggcacgcataaccgttgcggcgttttcgaaggcttgttccggcgtggcatacgccataaacggcaggtcagccagcagcaggcagtttggtgcgccgcgacgtacggcggcagtgtggtaggcgatatcggcaacggtaactggcagggtggagtcgtgcccctgaaccgtcatgcccaggctatcgcccaccagcatgacgttaagcccttcatcagcaaagagtttggcgaagctatagtcataagcggtgatggtcgcgaaacgttttttttcctgtttgtacttctgcagtaaggagatggtggtcggtttcataacgtatcctgataaattgatgttgtgctgtctggcattttatcagtcacattggtgggggcaatgatttatccgtagcagcactgccagaaggtgacagtgctgctacgttatcagggataggttacctggaaagtactggtggctttaaattcgccgggttcgatagcaatattcccgtcttgctttaatgttgcctggaaatgaagaggctgacttgtgccgttaccttgattagggtaaaccccatcggaggtgtcatcttcggtttcataatctatataaacagaattcgtatcattaggttttaatgtcattagcggatttttactggttgctaaaccttcaatgagtacgccaacgcctttggcggcagtgcttccagtaagcgtattaccaagcagttgtgtgttttgagtacctacttttccagtgacgagttttgtttcaatattacgcacacgaatacaattctgaaggctgatatcaaagggaacaggactagcgccatttttaattgtcccagagctatattctcccattctaaccgtactaccattgacacttggcccggtaagtatggaggtaaaacatgttggtaaggttaatttgacattattcagtgtgaaattgacataaatgtggttgctgtgatctacaacttttgtaccaggactgtaggccttaaagctataaaggtaattactactactggataactggacttgctgattaagtgtaggatcgaaattagtatctgtataaaattcaacagttatgttgtgtactataccaccaatagcccaaaacttatcgtagtcgtctgctttgttgcaacccttagtttgtagatcgctgtctgtgacggaaaagaaaaattcttggttggaaggatctccgatatagattcctgggctttgaatgtcagttattgtatcgtatgcagaccagaccctacttattaacatggtgtaatacagaccaggaacagatgtattaaatagtttatgtccgccataatctttaccactatagaccatggcattttcaatagttattggaccaggattcgctctgccagatgtattgcagtaaagaataccaccaccggtacctgtatccaggtaactccagtacatttttaccccagtcgggccgagctgcgtgggtttataaaaaaccaagttgcttgctgtacttgtgtaattaaaggtcatctgtgcggcagtggaggggcctcgatagttatcaactcctgcattatttcccacaataaaacttgtatatgcactgactgtattacaacaagaatacagtgctaaaaaaagaatgtacctgaagatagtcttcatttttactccaatgtttctttattgttatggtttgcgctgtttttgtttgttattcgtagtaaatatccactaacacatggctcataagttgaccagatgtaacactcaatgcaggatcgattttttgcattcgggtgctaaatttccaggaactaccattcatgtcatcgctcattactggataaacggaacgagatccgccactagcattaagaacattgaatgtattcgcgctatcctgagtagaaaatataactactcctacattacttgctccactgctaatttcattagcaaatatttgcctagagccagcagccatgacaccgctaagggctctaaaatcaatatgtaactgatttagcacatcgccagttccctgtaatgcacagtcggatacagtgatagtgaactcttttccacctggttgataactttcaggagtaacattaccactaaaatatcccaccccaacgacgccaagatcaatattaccctggttactgattccgcttttgcaggtgctgttttttacattggcaacaaggtcaatatcctgtccagcaatggctggacaggcgatgcaaaacagtaaactcagaaacagaattattctcttcatcagcttacgttgagtgggatgcatatatagttcctgaatctgtaagtctgttagttataggttactgtaaatgtggctggtgcagaaaacttacccgcagtgacattgtttacggttttatttttttccacgaccaggcgtgcactcatcggataataaacgaccgcattggctgcagtggagattgttacctcttgacttgctggtgttacacagctaaattgtgttgcactccctgttgccggagttacagtgctccagacttcaacggcgacagcacttgctttatctgcggctgtggaaccatttgcaaaccccgcaccgtcattagcagttccctcgcatgtggctcgcttggttaattttatttgcgcttttttattggggatacccgcacagtctttgaatttgagtttgaatgtttttactttggtcttggcattgatttcagaaatatatacatcaccaaaatcaacaacagaaatgtcctgatcagagtcatttactaatgtagcggtacaagtacccatttctacagtagtaataacggtcagtccaatactgtctgttgccgcataagagagtacgctgaacaaactggcagccaaaacgacactgctggataatccataacgtaaatttttaaatgtcatcataattatccttcttattgatagatgaaattaaacgtcgccagtgcacgaaaattccccggtacgccttgccctgcatctgtttcacgtagcgcaacggtcatttcaagacccttatcgggctgcatctcgtctgtgctccagcgtatcttttccgcactgttaggtttaaggaaagtggcatcatcagtagtccgttttttgaaacccataccgatattacttgtcgtgctagaactatcaccagactgcggtataataagcttaggactgctactacttgcatttccggtcagagtggtatcaatccaactgatgccactgctgcacccactggcaaccagtttaaaatcagcctgagattctgtcgttttattcgcgatcttatccagacccatcttagggattctcaatgtgtagttattattgccatcattcgtgacgttattaccagtaagtgtgatgttacaggttgtcgctttgacagtggctgtaaactctacattaatatccgttgcaaatacactgggacttaataatattcccatcagtatcactattttatgtggcgttgtttttatcatttgacgtcccttgtagttactgaatctgacaccgaattccattcagaataatagattgtgctattttttctgcttctgggctttgttgataatgcgcaagacaacttacgggtttactttgttcgagccatttaatgctgatatttccctgctgctcaataccacgaacaaatgcttgtccaccctgtccaacattaccaatgacattgccttgctcatcataaatatctgcagcaaatggaatatttttaccatcacttcgtgtgatgttcataatggcactttgcccttgcacggtttcaaaatcagcaaagacgacactaccctgacgcggtacagctactgcactggtactttttaattcaacatcgttctcaagatcgttgatatccagcgcgatacggttttcatgataaggagaaagagcgctggtgacaccataaccccatcgatcgatagtactgttgccataatttattcgcgctccttgagcacctggagcctgaactaccgccagtgtatcggagtcgctaaaactatcattactgaaagtcagtccaccgctatgcaatacaaaaccaccgtcggtgctgagagaaacttgacggctgttatcgctatttgcagaaatactacctgccagcgttccccatggactctcatagctggcataacccccaacataactcaaatctttgctggctttattcatcgtatagccagtattcacgctataactgacgcgagcgttatcgctatagccactgctgctaacgttgagttggttattacccttaaagtcactgcttatttgagtatcaatactctggaaaccactagtacgttgttcagtgccaagtaatttttcaattggaatggtgaaactaagataaacgctatcgtcagtgtcgccgtcttcattccaactacgctgggcactgacactgtagctgccccaggatgtactgttactgtagccaatagagtaattgctacgattttgtccggaagcccagtaatcggaccaacttccggaaagataaaaactaccgtaatcttttttctcaaatttcaacggttggttaatactgaccgtaacctgatttttcatgcgactgtaattacgcatggatttcggttcaagatcttgttcgggatgtttcacttcatcaattagagttagtgcatcattaagaccaaggtaattctgtgtgctatagcgataggccgcgatattcagactagtacttgtttcttcgaataacttgttccaggaaacacgataactttgcccctggtatgttttatcatccgggatacgaacattggaatgagtcacatcgaaagaaaatgcaccaacactagtattcagaccaagacctaacaaaccagcggtatagttattatcggttatctgaataccggtataacccgtcagatagttattcaggccgtagtagtagcttgcttgaaataaattaggctcatcctgaatatcatcttttaagacctgaccgccgctaatatcccaacgtccaacgccagggcgtaacatttgaacaacggaactgaaaggttggctgaatgtccgcttactgccatcggattcttcgatggtaacaataagatcgctgccgtacccactcggactcagatcatcaatgacgaaagcgcctggcggcaccgtcgtttcataaatcttatagccaccttgcgtaatagtgactttggcgttggtattggcaacgccatgaatgataggcgcaaagctggctaaagtcggaggcaacatgcggctgtcactgtataaacgaatgcctcggatactgacggaatcaaaggtttcgcccgtcgtataagactcaccaagaatgagttgagaacgcaggctggcgatatcacgctgaacataccgattcttaaaatcataattactgccagaatcggtcatccagttgtagttgccgctggcacgcagtcgccatgcacctaaattcatcccaccgttaaatgcagcataaatgctttcattttttcgaccaggggtttcactatgatatccgttgaggttgtaactcaacatggccgcattaatgccgttttcccataagcttggatcaacatagttttggtaatttttcattacccaggcttgaggaacgtctatatccagacgttgatcgttaacgtcataacgaacagaagcctgagggataatttccgtcaaattgaggcaattgccgagcgtttcatccctggcaagcagaacggctttttcgttatttatatcgggagaattaatatgaaactgcaataaattctttaatgtgatacaagcctgggcgttcttttttccttcaattgcgacaaatgtaatactttggttaatgattggttggtcgtttacataaacactgacgtcgtaaacacccggtatagcggggttaccttcactgtaccggctgagatcaatattagatgcattctgccccatcaggaaggtatggtcatattcaacgagttcagcactgaaagcagtattgcaatacagcagcgcgcaaaacgtggcgatacgggtcagatgatgataatttttagtatattctatagtcacgctatgcttcctgcggaattatatccttgcctgattacagcctggcattaccttcaattgcgccaccaaagtcattaatggcgtaaaaatgcacttttgcagaattcgctttgccattaaggccattgactttcatgacctcatcactaaatggtgcaatcattttcacatcaatcggatagcgtttaccgctagcttctaaatcaccactgctaaaagagacgtagtaaggggttggattggtcactcgtaaactcgccttaccttcactaccactccagaaccacttcagggctaacggggcttcagagggatttcccttcaatccatccgggcgatagaaaagttttatacgtgtgcgaaatgccagttgcagcaggctttgattcgcgaccttttctgcatctggttttggtggaacttccagtacgttaaaccagaacacgctctctctgtctttaggcagactggtgctggctgtgtacattaatttgattgtttgcccacgtttggcatcaatacggcttactggcggcgtagcagtaaaagggactgtaatactgccaggctcagcgttgtcatcgccagtatctaaccaactctggacaagcaacgggttattccctttattttccagacgtacgttgacacttttttgatcgcttttatatattacgcgagtaccgctaatgacaatgtccgcaatagagctactactaaaagccatacaggttacgaagcataaagctgttgtatgtttggtgttaaaaaacataaaccatccctgatagagttaattaaaacagggaataatataaaatagaaattattattccctgtatattcattcaatcaatttaactggtgaatacttactgataagtaatggtgtatgcagtgttagtttttacataaccagcagttgctgtttggtctgcgacggcacgaacgtaagacgctttaaaatcataaacagcagattttgtcgttgcatccagggctttagtatacacatcgccagggttgttaatttgaacctgtttgatagtggaaccatcaatattgtgtagagcgatattaacgccgtcagatgggttgttaatagacatgtcgttgttcaaagtccctttgctgttaccaaagaaaacagaaccgaaggtcattttagccgtgctacctggattcggatttgctttgctgcagtcaacggtgatgctgaaaggtttagctttagcgccaacggtgtcattcagtacgccagcatcgatttcaccaacggttgcggtttgcagcaggatcagaccatccttgttaccgccgtcaacgcgggtttcacaggtgttatcaacaaccagaccactgatatttaactgaccgccgtccatatcagcagaagcagtacctgcaaccatcgccagcataagaccagacagggcaaaacctaattttttagacataaaaatcctttaataaaattccattagtcagactacatgtttgaagaatgactattcatgacacaaataggagaaacaaatgttagatattaatgagcaatgatatttgttacccaaatttacaaccattgttcattaggtcgcctattgtgcactttagaagcttttgaacaaattaaatttacttaattcaaaattaagtaaaaataagttcacaagtgcaattggttagggtatggagatgggattgatatttatttataggaagttatattatttccgcaaagagatgtttaaactaaaatcgtaattaaggaaagagatgagatatgattttcagaaaatatttatattcgcaatataaataaattaccatttgtttaatttgtcaaatgctcttgtatgtaagatttgacgcaacatctccccatcaggaaacaccaactccggcgcgatttcaaacagcggccacagcataaatccacgattcttcatatcgtagtgcggaacggtcaggcgttcagtatttatcacttcattaccaaacagcatgatgtcgagatccagcgtgcgtggtccccagcgttcagctttgcggacgcgaccttgctgcaattcaatacgctgtgtgtgattgagtagctcttcaggtgcaagagaggtttccagcgccacggctgcgtttaagtaatcgggttgatcttgcggccccagcggtggggtgcggtaaaagctagaaacggtaagaatgtggctttcagggatatcgcctaatgctttcagggcagcattgacctgctccagcggagaggccagattgctgcctatggcaatatacgccactgtcatgcggtaccctcacgacgtggtgcgcgtttgcgtggacgacgagtacgacgacgcggactcggttcttcatccagctcgttgagcatccctttttggtctggtggcgcggaaacctggaactcaccccaccatttcaccagacgctgcagttcagcgttacgctcaacttcagctcgcaaggccaacaggtcataagccgcacggaacttaggatgctccagcagtttccatgcgcgtttaccctgacgacgggacatacgcaactgcaactgccagatatcgcgggttaatgtcgtcagacgtttcgggattgccagactacggcaggcttcgtccagcacgtcgttcatcgccagcgcgaaagcgtcgtgataggtcaggccgctttcctgggcgatcttctgtgccgtctccagcagtgggtaccagaacatggcggcaaacaggaacgccgggttcacgcgcatatcgttatggatacgcgtatcggtattcttcagcacctgttcaatgatccgctccatcgggctgtcgccattttccgtgaagtagcgggtaatggtcgggaacagcggctggaacagatgatattcacacaacagcttataggtttcgtaaccgtagcccgcttgtagcagtttaaggctttcttcaaacaggcgtgccggtgggatatcgttcagcagggtagcgaggcgagggatcggttctgcggtttccgggctgatgcgcatacccaatttggcggcaaaacgtaccgcgcgcagcatacgtaccggatcttcacggtagcgcgtttccgggttaccaatcagacggataacgccgtccttcagatccttcatgccgccaacgtaatcacggacggtaaaatccgctacgctgtaatacaggctgttgatagtgaaatcgcggcgctgggcgtcttcttcgatggagccgaaaatgttgtcgcgcagcaacatgccgttttgcccgcgttgggaggtcgtgcggtcgctgacgttaccttcgtggtgtccacggaaggtcgcaacttcgataatctccgggccaaacattacatgagccagacggaaacggcgacccaccaggcggcagttacggaacagtttgcgcacctgctcaggcgtggcgttagtggttacgtcaaaatctttcggctttttgccaagtaacaggtcgcgcacgccgccgccaaccagccaggcttcgtatcccgctttattgagcctgtacattaccttcagggcattttcactgatatctttgcgggaaatagcatactgctcacgcgggatcaccgtcacctgtggacgggcgactgcctgttcagcctcgctttcctcgcggcttagcaccttgcggcaaaaattagcgactcgggtaaaaatagtacacctcggtagtgtcaaacatcattcaggacaaaaaaatagcggctaatcatagctcagcaactcgcattactgaatgtactatttacaattgcgctctcgggcacggcggtaagccgccagtttttgacggcactctgaaggatttgctcgacgctgaaatcctgccagtgtgcttctgcctgctgccccagaaattgaagtgccgcgattagtaccgggcgtggatcgcctttcggcaacgcaggcgcatgattctgcttggaaagtttagcgccttgtggattaagcgccagcggcagatgaatgtaatctggcactttccagccaaaaagctggtacaggctgatttgccttactgttggttcaatcagatcagccccacgcactatttctgtaacgccctggaaatgatcatcaaccacaacagccaggttgtaggcgaacaacccatcacggcgatgaatgataaaatcttcccgtgccagtttttcgtcggcgtgaataatgccgcgcagctggtcagtaaattgcgtgaccggatgctgctggcggatacgcactgcggcgttgtctggtccatgatgcaacacccggcaatgaccgtcgtaaataccgccaatgctttgaatacgcgcacgcgtacaggtgcagtaataacttagtccttgttcatgtaaccaggcgagtgcttcacgataggcgtcgtgacgttggctttgccagagaacatcgccgtcccagtgcagaccgtaatgttccagctggcgcaggatagtttctgcggcaccgggaacttcacgaggcgggtcgatatcttctatgcgtaccagccagcgaccttgccgggcgcgagcctgcaaatagctgccgagcgcggcgatcagagagccaaaatgaagctcgccggaaggagagggggcgaagcggccaatatactgtgtgtctgtcatctctttgaacaaaaaataaggcgggagcatttcccgcctgtggtaaacgtgatggaacggctgtaattagccagccatctgtttttcgcgaatttcagccagcgttttgcagtcgatgcacagatcggctgtcgggcgcgcttccagacggcgaataccaatttcaacaccgcaggattcgcagtagccgaaatcttcgtcttccacttttttcagcgtcttctcgatctttttgatcagcttacgctcgcgatcgcggttacgcagttcgaggctgaactcttcttcctgggctgcacggtctaccgggtccgggaagttggctgcttcatcctgcatatgtgtaacggtgcgatcgacttcatccctgagttgattacgccatgcttccagaatacgacggaagtgcgccagctgggcttcattcatatactcttcgcccggcttctcctgatatggttccaccccagcgatggcgagaatactcagggagcttgttttacggttttgcccttcttgcatgttgcttctccttaacacgcactatcgatccccatgttcgggggaaaaatgaggccgctataaatagcagatgcttttccggatagcaattatctaaacgtaacacttgacaactgtgtgaggaaaagcgtatttgcgcacgcgaccagaatgtaaattaaccagttacttactttattacaatgtaaccggcagactttttttaagagccatgccttcagcagaaatttccgctttgtaagccagaatttctacccccctctgttgagcttcactcaatagttgcgcgtatttctcatcgatgtggcgcgcgggactaaaccgtgtaatggcactatgcagcacggcgaaaaagataaccgcacgctggccttcagccgctacgctcatcaactcccgaaggtgtttctgacctcgttcagtgaccgcatcgggaaaatatccctgttcgttctccgctaacgtaacgcttttcacttcaatatagcagtctggacggctatccgcctgcaacataaagtcaatacggctgcgttctgcgccgtattttacttcgcttttcaggctgctatagccactcagttcactaatactttcattaaggatagcctctttcgtcaacctgttagcccaaagcgtgttgacgcaaataaatgcgccgctctggctttgagttaattcccaggtgtgtgggtatttccgtttggtgttgtcactagtgctataccagacggtatcgccaggcgttgcacaaccggtcatcgcacccgtattcgggcagtgtagcgttaattcgcgaccatcgggtgtgatcacatcggctaaaaaacgtttgtaacgctgaattagcgtcgcgcgctgtagagggggagaaaattccattgcgacaatccttgttattgcgttagcgcccagcgttttagcggcgtgtagcgtgtgcgtccacgggcaaagctggaggcgtaaagggtgaactccgtcaccgcatagctccagttaaaacctggcggcgggattgtcaccgcctcgctggcgtcgcgcaataaggtaatatgtggatgaaacggacgattgctttgaaaacaaccgctgcgggcagcctgactacggagcatattcgccagctggattaagccgcgtggcggctgacgcatccctaaccacaccacacggctacgcagccattgtccggcgtcatcaagcgtgagtgtgaaaccaggttgacgaatccgtccggctaaaagagaaagcgccttctctttctcggcgctcacttcgcctaaaaatgccagagtcagatgcaaattatcggcggcgaccggacgtcccgcctcaggtgggaagtgtgtggcgcgccaatggataatctgttcgcggatttctgcaggtaagtcgatagcaaagaacagacgttgcggttcagacatgtgaggcactcggttatgaattaccgcgatgctacaatgtggcgcgaagaatgttaaccctctggagcgttttgtgagcagcttgcccgttgctgccgtcttacctgaattacttaccgctctcgattgtgcgccgcaggtattattaagtgcgccgaccggggccgggaaaagtacctggctgccgctgcaactgctggcgcatcccggcattaacgggaaaattatcctgctggagccgcgtcgtctggcggcgcgtaacgtcgcgcaacggctggcggagctgcttaacgaaaagccaggcgataccgttggctaccggatgcgtgcgcaaaactgcgtcgggccgaatacccgcctggaagtggttaccgaaggcgtgctgacgcgcatgatccagcgtgacccggaactgagcggtgttggactggtgatccttgatgaatttcatgagcgcagcttgcaggcggatttggcgttggcgctgttactcgatgtgcaacaaggtctgcgtgatgaccttaaactgctgattatgagcgctaccctggacaacgaccgcttgcagcaaatgctgccagaagcgcctgtcgtcatcagtgaagggcgcagctttccggttgaacgccgttatttaccgctgcccgcgcatcagcgttttgacgatgccgttgcggtagccaccgctgaaatgctgcgtcaggaaagcggaagtttactgttatttttacctggcgtcggagaaattcagcgtgtgcaggaacaactggctagccgcatcggcagtgatgtattgctctgcccgctgtatggcgcgttgagcctgaacgatcagcgaaaagcgatcctcccggcaccgcaagggatgcgcaaagtggtgctggcgaccaatattgctgaaaccagtttaaccattgaaggtattcgtctggtggtggattgtgcccaggagcgtgtggcgcgttttgatccgcgcacggggcttacgcgactgattactcaacgcgttagccaggcatccatgacgcagcgtgccgggcgcgccgggcgtctggagccgggtatcagcctgcatttaatcgccaaagaacaagcagaacgcgccgcggcgcaaagtgaaccggagatcttacaaagcgatctttccggtttgctgatggaattactgcaatggggatgcagcgatccggcgcagatgagctggctggatcaaccgccagtagtgaatctactggccgcgaaacgtctgttacaaatgctgggggcactggagggtgaacggcttagtgcgcaagggcaaaaaatggcagcgctgggtaacgatccgcgtttagcggcaatgctggttagcgcgaagaacgacgacgaagctgctaccgcggcaaaaattgccgccattctcgaagagccgccacggatgggcaatagtgacctgggcgtggcgtttagccgcaatcaaccagcctggcagcaacgtagtcagcaactgttaaaacgcttaaacgtacgtggcggtgaggcagacagtagccttatcgcgccgctacttgccggggcgtttgccgatcgcattgctcgtcgccgtgggcaagatggacgctatcaactggcaaacggcatgggagcgatgctcgatgccaacgacgcgctaagccgccacgaatggttgatcgcaccgttattattgcagggcagcgccagcccggatgcgcggattttactggcgctgctggtcgatattgatgagttagtacaacgctgcccgcagctggtacagcagtctgacactgtggagtgggatgacgcgcaaggtacgctgaaagcctggcgtcggctacaaatcggtcagttgacggtgaaagtgcagccgctggcgaaaccgagtgaagacgagttgcatcaggcgatgcttaatggcatccgtgataaaggtttaagcgtgctcaactggacggcggaagcggaacagctacgcttgcgtttgttatgcgccgcaaagtggttgccggaatatgactggccagcggttgatgatgaaagtttattggcagcgctggaaacgtggctgctgccacatatgactggcgtacatagtctacgcggcctgaaaagtctcgacatttatcaggcactacgcggattacttgattggggaatgcagcaacgtctggatagtgaattgcctgcgcattacactgtgccgacgggaagccggatcgccattcgttatcatgaagataacccgcccgcgctggcggtgagaatgcaagagatgtttggcgaggccaccaatccgacgatcgcccaggggcgcgtgccgctggtgctggagttgcttagtcctgcccaaaggccattacaaatcacacgagatttgagcgacttctggaaaggagcgtaccgtgaggtgcaaaaagagatgaaagggcgttatcccaaacatgtctggccggacgacccggcaaatactgcaccgacgcgacggacgaaaaagtatagctaaggttggttttctccctctccctgtgggagagggccggggtgagggcatcagcgcgcacgttcaccctcaccctaaccctctccctcaagggagaggggaccgatcgagcacaaattttgagagatatcttcttctgtcttgtaacagaagaacagaaaatcgggcttttgcgcctgaatattgcggagaaaaagcatggccgggaatgaccgcgagccaattggacgcaaagggaaaccgacgcgtccggtcaaacaaaaggtaagccgtcgtcgttacgaagatgacgatgattacgacgattatgatgactatgaggatgaagaaccgatgccgcgcaaaggtaagggcaaaggcaaagggcgtaagcctcgtggcaaacgcggctggctatggctactgctaaaactggctatcgtttttgccgtgctgatcgccatttacggcgtttatctcgatcaaaaaattcgtagccgtattgatggcaaggtctggcaactgcctgcggcagtttatggccgaatggtcaatcttgagccagacatgaccatcagcaagaacgagatggtgaagctgctggaggcgacccagtatcgtcaggtgagcaaaatgacccgtcctggcgaatttaccgtgcaggccaacagcattgagatgattcgccgtccgtttgatttcccggacagtaaagaaggacaggtgcgcgcgcgtctgacctttgatggcgatcatctggcgacgatcgtcaatatggagaacaaccgtcagttcggtttcttccgtcttgatccgcgtctgatcaccatgatctctagcccaaacggtgagcagcgtctgtttgtgccgcgcagtggtttcccggatttgctggtggatactttgctggcgacagaagaccgtcatttttacgagcatgatggaatcagtctctacagtatcggacgtgcggtgctggcaaacctgaccgccggacgcacggtacagggtgcgagtacgctgacgcaacagctggtgaaaaacctgttcctctccagcgagcgttcttactggcgtaaagcgaacgaagcttacatggcgctgatcatggacgcgcgttacagcaaagaccgtattcttgagctgtatatgaacgaggtgtatctcggtcagagcggcgacaacgaaatccgcggcttcccgctggcaagcttgtattactttggtcgcccggtagaagagctaagcctcgaccagcaggcgctgttagtcggtatggtgaaaggggcgtccatctacaacccgtggcgtaacccaaaactggcgctggagcgacgtaatctggtgctgcgtctgctgcaacagcaacagattattgatcaagaactctatgacatgttgagtgcccgtccgctgggggttcagccgcgcggtggggtgatctctcctcagccagcctttatgcaactggtgcgtcaggagctgcaggcaaaactgggcgataaggtaaaagatctctccggcgtgaagatcttcactacctttgacagcgtggcccaggacgcggcagaaaaagccgccgtggaaggcattccggcactgaagaaacagcgtaagttgagcgatcttgaaactgcgattgtggtcgtcgaccgctttagtggtgaagttcgtgcgatggtcggaggttctgagccgcagtttgcgggctacaaccgtgcgatgcaggcgcgtcgtagcattggttcccttgcaaaaccagcgacttatctgacggccttaagccagccgaaaatctatcgtctgaatacgtggattgcggatgcgccaattgcgctgcgtcagccgaatggccaggtctggagtccgcagaatgatgaccgtcgttatagcgaaagcggcagagtgatgctggtggatgcgttgacccgtagcatgaacgtgccgacggtaaatctggggatggcgctggggctgcctgcggttacggagacctggattaaactgggcgtaccgaaagatcagttgcatccggttccggcaatgctgctgggggcgttgaacttaacgccaatcgaagtggcgcaggcattccagaccatcgccagcggtggtaaccgtgcaccgctttctgcgctgcgtagcgtaatcgcggaagatggcaaagtgctgtatcagagcttcccgcaggcggaacgcgctgttccggcgcaggcggcgtatctgacactatggaccatgcagcaggtggtacaacgcggtacgggtcgtcagcttggggcgaaatacccgaacctgcatctggcagggaaaacagggactaccaacaataacgtagatacctggtttgcgggcattgacggcagcacggtgaccatcacctgggtcggccgtgataacaaccagccgaccaaactgtatggtgccagcggggcaatgagcatttatcagcgttatctggctaaccagacgccaacgccgctgaatcttgttccgccagaagatattgcagatatgggcgtggactacgacggcaactttgtttgcagcggtggcatgcgtatcttgccggtctggaccagcgatccgcaaagcctgtgccagcagagcgagatgcagcagcagccgagtggcaatccgtttgatcagtcttctcagccgcagcaacagccgcaacagcaacctgctcagcaagagcagaaagacagcgacggtgtagccggttggatcaaggatatgtttggtagtaattaacatctaagcgtgaaataccggatggcgagttgccatccggtaaaataacatcccatctaagatattaaccctttcttttcatctggttgtttattaacccttcaggaacgctcagattgcgtaccgcttgcctgtaagactcaatgtaagccgtgccaaaatatgatggctaggacgagctagaacccgccagcgtttcgaatattatcttatctttataataatcattctcgtttacgttatcattcactttacatcagagatataccattccatataacggccctgtacgcctggacggataaagcgtttacgcgacaacggatgcccgatgcgacgctggcgcgtcttatcgggcctacaaacggccccgaatcgtaggtcggataaggcgttcacgccgcatccgacaaaccatgctggatcacaacttcgcaaacacccgacgtgcagcatcgatggtgttattgatatcttccatgctgtgcgccacggacataaagcccgcttcaaacgcactcggtgccaggtaaacaccttcgtccagcatcatatggaagaaacgcttaaagcgttccacgtcacaggccatcacatcctgatagcacgtcacggactcggcgtcggtaaagaaaataccgaacatgccgccaacgtggttaacgaccagcggaattccggcttcttctgccgcttccagcagaccttctgccagacgtgttgtcagctcatccagcgtttcgtgaacgcccggctgcgcgacttcattcagacaggcgaaacccgctgccatcgcaatcgggttaccggaaagcgtacccgcctgatagaccggacccgtcggggccagcgcatccattacatcacgacgaccaccgaatgcgcctaccggcattccaccgccgatgattttgccgaggcaggttaaatctggcactacgccgtaataatcctgtgcgccagctagcgctacgcggaaaccggtcatcacttcatcgatgatcagcaacgcgccaaattcgtcgcacagcgcgcgcagacctggcaggaactctggcagcggcggaacacagttcatattgcctgccaccggctcgacgataatacaggcaatctcttgcgggtattgctcaaatgcggcgcgtacagaagccagatcattataagtacaggttaaggtatatttggcgaaatctgccggaacgcccgggctgtttggctggcctaacgtgagtgcgccagaaccggctttcaccagcaggcagtcagcgtgaccatggtaacacccttcaaatttaataattttgtcgcgaccggtaaaaccacgggccaggcggatggcgctcatggtcgcttcagtgccggagttcaccatgcgcaccatatccatggtcgggaccagttcggtcaccagttgcgccattttcacttccatttcggttggtgcaccaaagcttaaaccacgctcggcggcttcaatcacggcattgcggattgccggatggttatggcccagcaccatcggcccccaggaaccgacataatcgatataggctttgccatcaacatcgtacagataagcgccgtccgctttttcgataaacagtggagtgccgcccacgccagtaaaggcgcgaacaggggagttcacaccgccagggatcagctcgcgcgctgcgctgtaaagattttcagacttactcatggagggttcctgattcgtagaaaaagtgaatggctgctattctatgttattcataacaagttaaatactcgtcaaacatcaggctgcttgtactggtgcaatcctgatttcttagagtataaaagttttgtgcatttgaaacattacgctttgcaaaggattttcatggaacgtgcgagtaaaatgccgtcatcttatttgtatgaccaataagtgatcattggatgaaaactgatactccctctttagaaacaccgcaggccgcgcgcctgcgacgcagacaactgattcgccaacttcttgagcgcgataaaaccccgttagccattttgtttatggcggcagtcgtcggcacgcttgttgggctggcagcggttgcttttgacaaaggtgtcgcctggttgcagaaccaacgtatgggggcgctggtacatactgctgataattatccgcttctgttaaccgtcgcttttctctgtagcgcggtgctggcgatgtttggctactttttggtgcgcaaatacgcgccggaagcaggtggtagcgggatcccggaaattgaaggggcgctggaagatcaacgtcccgttcgctggtggcgtgtattgccggtgaagttctttggcgggctggggacactcggcggaggcatggtgttggggcgcgaagggccaaccgtgcagatcggcggtaacattggccgtatggtgcttgatattttccgcctgaaaggtgacgaagctcgccatacgctgctggcaaccggtgctgctgcggggctggctgcggcctttaacgcgccgctggcgggtattttgtttattatcgaagagatgcgtccgcagtttcgctatacgttaattagcattaaagcggtatttattggtgtcattatgagcaccattatgtaccggatttttaatcatgaagttgcgttgattgacgtcggtaaactttctgatgcgccgcttaatacgctgtggctttatctgatcctcggtattatttttggcattttcggccctatttttaataaatgggtgctggggatgcaggatttgctgcaccgtgtgcacggcggcaatattaccaaatgggtgctaatgggcggtgcgattggcggtctgtgtggattgctggggtttgtggcaccagcaacgagcggcggcggttttaacctgattcctatcgctaccgcggggaatttcagcatgggaatgctggtgtttatcttcgtcgcgcgggtcattaccaccttactctgcttctcttccggcgcgccgggcggtatttttgccccgatgctggcgctgggtactgtgctgggaaccgctttcggaatggttgccgttgagctgtttccgcaatatcaccttgaggcggggacgtttgctattgccggaatgggggcattactggcggcatctattcgcgcgccgttaacggggatcattctggttctggagatgaccgataactaccagctcattttgccaatgattattaccggtcttggcgcaacactattagcgcaatttaccggcgggaaaccgctatacagcgcgattcttgcgcgcacgctggcaaaacaggaagctgagcaactggcgcgaagcaaggccgcaagtgccagcgagaatacttgaacgaaataccagggtattagataatggcgattattattgggttagaatttgcccaattgccgatgtcgtttggagcaaaatatgagtgatgacgtagcactgccgctggagtttaccgacgcagcagccaacaaagttaaaagcctgatcgctgacgaagataacccgaatctgaaattacgcgtgtatatcaccggtggcggttgcagcggcttccagtatggtttcacctttgatgatcaggtgaacgaaggcgatatgaccatcgaaaaacagggcgttggcctggtggttgatccgatgagcctgcaatatctggtcggcggttccgttgattataccgaaggtctggaaggttctcgtttcatcgtgaccaacccgaacgcgaaaagcacctgcggttgcggttcttcctttagtatctaatctgttgttcatgtgccggataaactatccggcacatcttctctcttcaacgcccattctcatccagcgcaaacgtcggtagcttaagatgccaacgaatagccgccagccgaatcaatagcgtcacgaccatgcccatcatactggctgtttccagtggtacggaaaatgtgtaataagccgtagcgtggacaataccgccgataatacaggcagttgcgtagatttctgtacgtaaaatcatggggatttcgcgggccagaacatcacgaatgatcccgccgccaacgccagtaatgacgcccatacaaaccgcgattaacggaccggcttccgcattaaaggctttattcacgccaatgccgacaaacaccgccagaccaacggcgtccagcaccggcaacatccattttggtaagcgtcttggctggcgcaccagcacgatggtcagcatgctggtgaccattgcaacgaccagatcggtgggatctttcacccaaaataccgggccgtgatccagcgccatgtcgcgaattgtcccgccgcctactgcggttaccacgcccagtaccagaacaccaaaagggtccatacgcaattttccggctaacaaaacgccggagatggcaaataccgctgtgccgactatattcagccaatagacgagcattgttcaatccccactgagcacctgaaaaggtcaggcgttaatctacctgactaagcgcattacagagctgttgtgcagcgaggataatacgtgggcttgcacgttcaaaccagtcactcgtgagaggaataacgggaattttgagctgttcaccccagtattgtttgattttaggaatttggtccggtccgcctgtaatgacaatcgcctgtgggctgcgtgctaacacctgttcgcggctaacttgcggccagggaacccggctgtctttaaagatgttttctccgccacaaacttcgagtacctggttctgaatgctctcttttccactggtaaatggcggattaatgccgaattgcagaaaaacacgttttttaggtttatcagcatattgcgctttcaattgcgcgtactgatccagcagggattgcgcggcttgttcggccttgtctggttgcggactccagggggccagttgacgtaacgcattggcaatttgttcaatgcttgtcgcatcgacccacatcacttttattcccaggctagccagctggtcaacctgccgctcggcattacctccacgccaggcaatcaccagatcgggtttcagcgcgacaatgcgttccagattcatcccctgccaggtggaaacctgctcaatcttttgcgcttgtggaggatagtcggaatagctgctgaccccaaccggcgtgatcccggcggcaaaggcaagttcagtgttggcgggagaaagcgtgatgacgcgcggcgcggcgttgagccacagtggcgcaagaaaagacagggcgaccagcgccctgaacagactcttagccatgtgcaagtttctgcaccagactctcaaccatcaggctggactgtttagcggcaacagccaggaactcatcgaagctaagatgagactgttgatcggccacgtcggagatggcgcgtacgacaacaaacgggacgttgaaattgtggcagacatgggcgattgccgtcgcttccatctctacagcaatggcctgtgggaagttgtggcggattttcgccagaccaacagaaccgttgatgaaagcgtcgccgctaacaatcaggccacgtacagcgttaagattcagttcggcaatgcaggcctcagcggcagcgatcagtttatcgtcagctttaaagcctgccggacagcctggtaactgaccgtattcataaccaaatgccgtgacatccgcgtcgtgataacgtgcttcgtcgctgacaacgatatcgcccactttcaacgttggtgccaggccaccggcagaaccggtgttaataatcacatctggcttgcagtgttccaacagcaaagtggcacccagcgccgcagcgactttaccgatgccgcttttcagaagcgcaacctcggttccattcagttggccggtatagatttcgcaaccgccgagactgatagtttgacggttttcgattttgtcacgcagcagcgtaacttcttcttccattgcaccaatgatgccgattttcatagatttactcgcgataagcccgatttgaaggcatagtttaccatgcgcttacggggaagcgtatttctcacgcgggagaggacatggcacagattgatttccgaaaaaaaataaactggcatcgtcgttaccgtagtccgcagggcgttaaaaccgaacatgagatcctgcggatcttcgagagcgatcgcgggcgtatcatcaactctccggcaattcgtcgtctgcaacaaaagacccaggtttttccactggagcgcaatgccgccgtgcgcacgcgtcttacccacagcatggaagtccagcaggtggggcgctacatcgccaaagaaattttaagccgtctgaaagagcttaaattactggaagcatacggcctggatgaactgaccggtccctttgaaagcattgttgagatgagttgcctgatgcacgatatcggcaatccgccgtttggtcattttggcgaagcggcgataaatgactggtttcgccaacgtttgcacccggaagatgccgaaagccagcctctgactgacgatcgctgcagcgtggcggcactacgtttacgggacggggaagaaccgcttaacgagctgcggcgcaagattcgtcaggacttatgtcattttgaggggaatgcacaaggcattcgcctggtgcatacattgatgcggatgaatctcacctgggcacaggttggcggtattttaaaatatacccgtccggcgtggtggcgtggcgaaacgcctgagacacatcactatttaatgaaaaagccgggttattatctttctgaagaagcctatattgcccggttgcgtaaagaacttaatttggcgctttacagtcgttttccattaacgtggattatggaagctgccgacgacatctcctattgtgtggcagaccttgaagatgcggtagagaaaagaatatttaccgttgagcagctttatcatcatttgcacgaagcgtggggccagcatgagaaaggtagcctctttagcctggtggttgaaaatgcctgggaaaaaagtcgcagtaatagtttaagccgcagtacggaagatcagttttttatgtatttacgggtaaacaccctaaataaactggtaccctacgcggcacaacgatttattgataatctgcctgcgattttcgccggaacgtttaatcatgcattattggaagatgccagcgaatgcagcgatcttcttaagctatataaaaatgtcgctgtaaaacatgtgtttagccatccagatgtcgagcggcttgaattgcagggctatcgggtcattagcggattattagagatttatcgtcctttattaagcctgagcttaagtgactttactgaactggtagaaaaagaacgggtgaaacgtttccctattgaaagccgcttattccacaaactcagcacgcgccatcggctggcctatgtcgaggctgtcagtaaattaccgagtgattctcctgagtttccgctatgggaatattattaccgttgccgcctgctgcaggattatatcagcggtatgaccgacctctatgcgtgggatgaataccgacgtctgatggccgtagaacaataaccaggcttttgtaaagacgaacaataaatttttaccttttgcagaaactttagttcggaacttcaggctataaaacgaatctgaagaacacagcaattttgcgttatctgttaatcgagactgaaatacatgaaaaaaaccacattagcactgagtgcactggctctgagtttaggtttggcgttatctccgctctctgcaacggcggctgagacttctagtgcaacgacagcccagcagatgccaagccttgcaccgatgctcgaaaaggtgatgcctagtgtggtcagcattaacgtagaaggtagcacaaccgttaatacgccgcgtatgccgcgtaatttccagcagttcttcggtgatgattctccgttctgccaggaaggttctccgttccagagctctccgttctgccagggtggccagggcggtaatggtggcggccagcaacagaaattcatggcgctgggttccggcgtcatcattgatgccgataaaggctatgtcgtcaccaacaaccacgttgttgataacgcgacggtcattaaagttcaactgagcgatggccgtaagttcgacgcgaagatggttggcaaagatccgcgctctgatatcgcgctgatccaaatccagaacccgaaaaacctgaccgcaattaagatggcggattctgatgcactgcgcgtgggtgattacaccgtagcgattggtaacccgtttggtctgggcgagacggtaacttccgggattgtctctgcgctggggcgtagcggcctgaatgccgaaaactacgaaaacttcatccagaccgatgcagcgatcaaccgtggtaactccggtggtgcgctggttaacctgaacggcgaactgatcggtatcaacaccgcgatcctcgcaccggacggcggcaacatcggtatcggttttgctatcccgagtaacatggtgaaaaacctgaccagccagatggtggaatacggccaggtgaaacgcggtgagctgggtattatggggactgagctgaactccgaactggcgaaagcgatgaaagttgacgcccagcgcggtgctttcgtaagccaggttctgcctaattcctccgctgcaaaagcgggcattaaagcgggtgatgtgatcaccagtctgaacggtaagccgatcagcagctttgccgcactgcgtgctcaggtgggtactatgccggtaggcagcaaactgaccctgggcttactgcgcgacggtaagcaggttaacgtgaacctggaactgcagcagagcagccagaatcaggttgattccagctccatcttcaacggcattgaaggcgctgagatgagcaacaaaggcaaagatcagggcgtggtagtgaacaacgtgaaaacgggcactccggctgcgcagatcggcctgaagaaaggtgatgtgattattggcgcgaaccagcaggcagtgaaaaacatcgctgaactgcgtaaagttctcgacagcaaaccgtctgtgctggcactcaacattcagcgcggcgacagcaccatctacctgttaatgcagtaatctccctcaaccccttcctgaaaacgggaaggggttctccttacaatctgtgaacttcaccacaactccatacatcttcatcatcctttaggcatttgcacaatgccgtacgttacgtacttccttatgctaagccgtgcataacggaggacttatggctggctggcatcttgataccaaaatggcgcaggatatcgtggcacgtaccatgcgcatcatcgataccaatatcaacgtaatggatgcccgtgggcgaattatcggcagcggcgatcgtgagcgtattggtgaattgcacgaaggtgcattgctggtacttagtcagggacgagtcgtcgatatcgatgacgcggtagcacgtcatctgcacggtgtgcggcaggggattaatctaccgttacggctggaaggtgaaattgtcggcgtaattggcctgacaggtgaaccagagaatctgcgtaaatatggcgaactggtctgcatgacggctgaaatgatgctggaacagagccggttgatgcacttgttggcgcaggatagccgtttgcgggaagaactggtgatgaacctgattcaggcagaggagaatactcccgcacttactgaatgggcgcaacggctggggatcgatctcaatcaaccgcgagtggtggctattgttgaggtcgacagcggtcagcttggcgtggacagcgcaatggcggagttacaacaactgcaaaacgcgctgactacgcccgagcgtaataatctggtggcgattgtcagcctaaccgaaatggtggtgttgaaaccggcgttgaactcttttgggcgctgggatgcagaagatcatcgtaagcgagttgaacaactgattacccgcatgaaagagtacggccagctgcgttttcgcgttagtctgggcaactattttaccggtcctggcagtattgcccgatcctatcgtacggcgaaaacgacgatggtggtgggtaaacagcggatgccagaaagtcgctgctatttttatcaggatctgatgttacctgtgttactcgacagtttgcgtggcgactggcaggccaacgaactggcgcgaccgctggcgcggctgaaaacgatggacaataacggcttgctgcgacgaacgctggcggcgtggtttcgccacaatgtgcaaccgctggcaacgagtaaggcgttgtttattcatcgtaataccctggagtatcggcttaatcgtataagcgaactgaccgggcttgatttgggcaattttgatgacaggttgctgctgtatgtggcgttacaactggatgaagagcggtaagttatgcgttaaggttgaggcggcgctggctcattcccctcagcccgaagggtagaggggaatgcccgaattaaccgtcagttcgggattatttacgcgttagtttttccagatcggcttcaatctcgctgatcttattggttacgacactctccaggtgacgtaagtcgtcgaggatcttacgcttaagatcaacttcgctgcggtcacgctggcagatttgatcaagctcatcaatgatataccgtagattcgggctgatttcctggacttctttataaccctgacccacaccatcagcgacgaccgttttacgctgacgcggatatttaaacttaacgctcttggcgaaaaactcgcctttgtctttctggaaatagattttcagaatatcgttgttggcttcctgccggaggctgtaacgatcaatttcttcaggattggtaatacccagacttttcagattgtcgtacatagcgttacctcaaaatgagtcagtaaattgtgcttattttagcatttggcctggcccgcccggctcgactgtgatcgcagaaagcctttttcttccagacttctatcatggcgtaaaaatcaaaaaattacctgctttattctggtgataaaattcacgatttacaccagttccagcatcgttacttccgggcggcagttcagacgcaaaccatacaaactgcccacgccacgggttgtgtagatgtgtctttcgccaaaggcatttaatccggcgacgtaacgtttatcttcgacaggggcaaaaggttcaccaaccaacggtacgcgcagttgcccgccgtgagtatggccgcacagcatcagatcccagggttcatcacgcatgacttctttgctgtcgggattatgcgccagcaccagtcttggcagattggcttcgctggcgggaggcggtttgcattgtccggcccataagtcaccagtgcctaccagttcgaattgcctgttcggcgtggcgatcaccgtagcctggttaaacaacaccgtgatgcccgcacttttcaacgtctcgccaattaagtgatttttttctgtaccaacagggcgatcgtggttgccgaagcaggcaaacgtcggcgcacattcggcaaggggggagagtacgtcactaaacgcgctaaaattcaggctcatatcaaataatacgtaatcgccgcccagtaatatcaaatcgggcttttgttctatgccaagagcaatcgcgtcagaaatcaggcttaaaggaacaaaacgagagtaatggagatcggccagaaaaagaattttgaatggtgctgcgttgtctttaaaaaaggcgaggcggtgacggattaattcaaaccagcctggctcacagtaatgcatataaccgaaaccactgctcgtggctatcgtcgcggcagtagcctgcaaaaatcggcggcgactaatcatcgctcatccctgcaaaaaaatcgggcagcgtcgtgctgcccgtgtgcatacttttagtcgatggtacgcagcagttcgttaatgccgactttgccgcgagttttcgcgtcaactttcttaacgataaccgcacagtagaggctgtatttgccatctttactcggcagattaccactaacaaccacagaccccgccggaacgcgaccgtagtggatttcgccggtttcacggtcgtaaatacgggtgctctgaccaatgtatacgcccatggaaatgacggaaccttcttcgacaatcaccccttcaaccacttcagagcgcgcgccgatgaagcaattatcttcaatgatggttgggttagcctgcagcggttccagcacgccgccgatgcccacgccaccggaaaggtggacgtttttaccaatctgcgcacaagaaccgacggtcgcccaggtatcaaccatggtgccttcatcaacatatgcgccgatgttgacgtaagacggcatcagcacggtgttacgggcaataaacgcaccctgacgtaccgccgctggtggcacaacgcggaagccttctttctggaaacgtgcttcgtcgtagtcggcgaatttcatcggcactttgtcgaagtagcggctttctgccccttcgatcacctgattatcattaatacggaaagagagcagcaccgcttttttcaaccactgatgcgtcacccactgaccgtcaattttttccgctacacgcagtgcgccggaatccagcagggcgatcacctgatttaccgcttcgcgggtaacggtgtctgcattggctggcgtgatctcggcacggcgttcaaaagcggtttcaataatgttctgtaactgctgcattgttaaactcttttcatatcagtaaacacatcaccctttatcgtttggattgagggcctctgtcaaccgctgatgcacttcctgctgcaactcgttattaagcgcacgccggtcagcggtggcaattatgaataaatcttctactcgctcgccaatggttgtaattcgggcaccatgaaggctaattcccagatcggcaaaaattttcccgactcgcgccagcagtccaggttggtcgagggcgatcagttcgaggaagcttttgcggtcggtatgggtcggcaaaaacgttacttcggtttcaacagtaaaatggcgtaatttggcgggttggcgacggggctgcggtggctgccagctactttgcgtcagtacttgctccagaccaaaccgaataacctcatgacgatctgcggacagcgggttgccatcgggttccagcacgataaaggtatccatcgccataccgtcgcgagtggtgaaaatttgtgcgtcgtgaacacttaaattgcggcggtctaattcggcacagacggcggcaaacagataagggcggtccgggctccagataaaaatctcggtgcctccacgcgtagcctgcgggctaagcaataccagcggtttgcttaaatcatgctgtaataaatggcgggcatgccaggccagttgatttgggctatggcggacaaaatagttagcacgacagcgactccaaatttggtgcagcgcctcttcgtcgatgttatccatgcgcagtagtgccagtgcctggagttggtgatggcgaacccgttcgcgcatatccggcgtgttttgcattccgcgtcgtagctgcttttcggtggcaaagtagagctcacgcaacagactttgcttccagctattccacagcgtttcgttggtggcgcaaatgtcagccacagtcaggcataccagatagcgcagacgattttccgtttgcacttcttcggcaaactgcttgatgacttccgggtcctgaatatcgcggcgttgggcggtcacgctcatcaacaggtgctggcgaaccagccaggcgaccagctgtgtttcgcgactgttcagcccgtggagttcggcaaaatgcactacatcctgagcaccgagaatggagtggtcgccgccgcgtcctttggcgatatcgtgaaacagcgcggcgatgaaaatcagctcagtactcggcaggcgcggccagacgtccacacacaacggatggcgctggcgcgtttcttcactggcaaaactctccagtttcagcatcacgcggatagtatgttcatccaccgtgtaggcgtggaacagatcaaactgcatctgcccgacgatatggctccattgcggcatatacgcgccgagcacgctatggcgatgcattggcaatagcccgcgccgcaccgctccggggtgacgcagaatgctcaaaaacagttttcgtgcttccggaatattacacagcggttgttgcagatggcgacgggcatggcgtaactggcgcagcgtggtggagtaaatgccggtgatcgcactgttgtgcaccatggtgtagaacatacgcaagatggcttccggctggcgcataaatagtgtttcatcacgcaggtcgattagcgtaccgcgtagctgaaactcatcgtcgattggacgtggtttttcgtcggcgggaagggcgaggatggcttcatcgaacagttgcagcagcatctggttgagttcactgacgcggcgtgtaacgcggaagtaatccttcatcatccgctcgaccggttcgttaccttcaccactgtaattcagacgctgggcgacgctaagctggcgatcgaataacaggcgattatcgtaacggctgacgaccagatgcagggcaaagcgaatacgccacaatatatgcagacattcgtttaattccgcccgctccgcactggttaagaagccaaacccgaccatttcatccaggcttgttgcgccaaaatgacggcgggccacccattgcagagtgtggatatcgcgcaagccgccagggctgcttttgatgtctggttcaaggttgtagctggtgccatggtaacgctgatggcgctggttctgttcttcaactttcgccgcgtagaacttgtcggaaggccagaatccttcgctgaaaatatgtttttgcagttcgaggaacagcgcaacatcgccaattaataagcgggattcgattaaattggtggcgacggttaaatcgcttaacccttccagcatgcactcttcaagcgtgcgcacgctatgaccgacttccagctttacatcccagagcagcgttaacagctcgcccactttttgcgcctgatcgtccgggagctttttacggcttaaaatcagtaaatcgacgtcactaagtggatgcagctcgccacgaccgtagccaccgacggcgaccaatgccaggtcggcaatctggctgaatcccgcttcaatccataatcgttgcaggagctggtcgataaactcggtgcgcgcctcaatcaactgttctgcagagatcccattgtcaaaggcatcacccagccaacgctggaaagtatcgatatgggcttttatcccaccgacggttaattcatcacggggccagacgcatggattttgcggttgaccgggcagggtggggagagcggtgtttgcgtactgttctggaagggtattcattgtgcgccacccataagattaaattatcgcattaaaaaagccggcattcgccggcttcatcttattcgtcgtggctgattatcgccgggatggtgtcatccttgcgtagcgtcagaatttcgcagccgttatcagtcaccacaatagtatgctcatattgtgcagacaagctgcgatctttggtttttaccgtccagccatctttcatggtgcggatctcttttttacccgcgttgaccattggctcgatggtgaacgtcatcccaggtttcagtacgacgttggtttcacgggagtcatagtgcagcacctgcggttcttcatggaagccgcgaccaataccgtgtccgcaatattcacgaacgacggagaagccttctgcttcgacaaatttctgaatcgccgcaccgatttcgcgcagattaatgcctggttttaccatgcgtagcgccaggtacaggctttcttgcgtgatgcggcacagacgttcgcccatgatggtcggcttaccgacgataaacattttgctggtatcgccgtggaaaccatctttgattacggtgacatcaatgttaacgatatcgccatctttcagcagcttagcatcgtccgggataccgtggcacaccacttcattaatagagatgcaaacggatttcggatagccgtgatagccgaggcaggcagaaaccgcgtgttgttcattaacaatgtaatcattacagatgcgatccagctcgccggtgctgacgcccggtttaacatacggttcgatcatctccagcacttcggcagccagtcggccagcgacgcgcattttttcgatatcttctggggtcttgatagagatagccattaattctgtccatcagcgtcggtgataccgacaatatatatgtaagtgccgtcaatggtatcacacccgggcaaattgagaatcattctgaatttcgccaaacgtgccactgaaggttttctataatagaaaattcgacgtctgatgctgtacacagcgccaacaattattggtgtccacgacgtatttgtggtataaagcgcgccggacttccgatccatttcgtatacacagactggacggaagcgacaatctcactttgtgtaacaacacacacgtatcggcacatattccggggtgccctttggggtcggtaatatgggatacgtggaggcataaccccaacttttatatagaggttttaatcatggcaactgtttccatgcgcgacatgctcaaggctggtgttcacttcggtcaccagacccgttactggaacccgaaaatgaagccgttcatcttcggtgcgcgtaacaaagttcacatcatcaaccttgagaaaactgtaccgatgttcaacgaagctctggctgaactgaacaagattgcttctcgcaaaggtaaaatccttttcgttggtactaaacgcgctgcaagcgaagcggtgaaagacgctgctctgagctgcgaccagttcttcgtgaaccatcgctggctgggcggtatgctgactaactggaaaaccgttcgtcagtccatcaaacgtctgaaagacctggaaactcagtctcaggacggtactttcgacaagctgaccaagaaagaagcgctgatgcgcactcgtgagctggagaaactggaaaacagcctgggcggtatcaaagacatgggcggtctgccggacgctctgtttgtaatcgatgctgaccacgaacacattgctatcaaagaagcaaacaacctgggtattccggtatttgctatcgttgataccaactctgatccggacggtgttgacttcgttatcccgggtaacgacgacgcaatccgtgctgtgaccctgtacctgggcgctgttgctgcaaccgtacgtgaaggccgttctcaggatctggcttcccaggcggaagaaagcttcgtagaagctgagtaataaggcttgataactcccccaaaatagttcgagttgcagaaaggcggcaagctcgagaattcccgggagcttacatcagtaagtgaccgggatgagcgagcgaagataacgcatctgcggcgcgaaatatgaagggggagagcccttatagaccaggtagtacacgtttggttagggggcctgcatatggccccctttttcacttttatatctgtgcggtttaatgccgggcagatcacatctccgaggattttagaatggctgaaattaccgcatccctggtaaaagagctgcgtgagcgtactggcgcaggcatgatggattgcaaaaaagcactgactgaagctaacggcgacatcgagctggcaatcgaaaacatgcgtaagtccggtgctattaaagcagcgaaaaaagcaggcaacgttgctgctgacggcgtgatcaaaaccaaaatcgacggcaactacggcatcattctggaagttaactgccagactgacttcgttgcaaaagacgctggtttccaggcgttcgcagacaaagttctggacgcagctgttgctggcaaaatcactgacgttgaagttctgaaagcacagttcgaagaagaacgtgttgcgctggtagcgaaaattggtgaaaacatcaacattcgccgcgttgctgcgctggaaggcgacgttctgggttcttatcagcacggtgcgcgtatcggcgttctggttgctgctaaaggcgctgacgaagagctggttaaacacatcgctatgcacgttgctgcaagcaagccagaattcatcaaaccggaagacgtatccgctgaagtggtagaaaaagaataccaggtacagctggatatcgcgatgcagtctggtaagccgaaagaaatcgcagagaaaatggttgaaggccgcatgaagaaattcaccggcgaagtttctctgaccggtcagccgttcgttatggaaccaagcaaaactgttggtcagctgctgaaagagcataacgctgaagtgactggcttcatccgcttcgaagtgggtgaaggcatcgagaaagttgagactgactttgcagcagaagttgctgcgatgtccaagcagtcttaattatcaaaaaggagccgcctgagggcggcttctttttgtgcccatcttgtaaattcagctaacccttgtggggctgcgctgaaaagcgacgtacaatgtcgctagtattaattcatttcaatcgttgacagtctcaggaaagaaacatggctaccaatgcaaaacccgtctataaacgcattctgcttaagttgagtggcgaagctctgcagggcactgaaggcttcggtattgatgcaagcatactggatcgtatggctcaggaaatcaaagaactggttgaactgggtattcaggttggtgtggtgattggtgggggtaacctgttccgtggcgctggtctggcgaaagcgggtatgaaccgcgttgtgggcgaccacatggggatgctggcgaccgtaatgaacggcctggcaatgcgtgatgcactgcaccgcgcctatgtgaacgctcgtctgatgtccgctattccattgaatggcgtgtgcgacagctacagctgggcagaagctatcagcctgttgcgcaacaaccgtgtggtgatcctctccgccggtacaggtaacccgttctttaccaccgacagtgcagcttgcctgcgtggtatcgaaattgaagccgatgtggtgctgaaagcaaccaaagttgacggcgtgtttaccgctgatccggcgaaagatccaaccgcaaccatgtacgagcaactgacttacagcgaagtgctggaaaaagagctgaaagtcatggacctggcggccttcacgctggctcgtgaccataaattaccgattcgtgttttcaatatgaacaaaccgggtgcgctgcgccgtgtggtaatgggtgaaaaagaagggactttaatcacggaataattcccgtgatggataaataagggtaagattccgcgtaagtatcgcgggggcgtaagtctggttataaggcgttattgttgcaggcagtttggtcacggccagcgcgcagcaaccggagcgtacaaaagtacgtgaggatggcgagcactgcccggggccaaaatggcaaataaaatagcctaataatccagacgattacccgtaatatgtttaatcagggctatacttagcacacttccactgtgtgtgactgtctggtctgactgagacaagttttcaaggattcgtaacgtgattagcgatatcagaaaagatgctgaagtacgcatggacaaatgcgtagaagcgttcaaaacccaaatcagcaaaatacgcacgggtcgtgcttctcccagcctgctggatggcattgtcgtggaatattacggcacgccgacgccgctgcgtcagctggcaagcgtaacggtagaagattcccgtacactgaaaatcaacgtgtttgatcgtagtatgtctccggccgttgaaaaagcgattatgacgtccgatcttggcctgaacccgaactctgcgggtagcgacatccgtgttccgctgccgccgctgacggaagaacgtcgtaaagatctgaccaaaatcgttcgtggtgaagcagaacaagcgcgtgttgcagtacgtaacgtgcgtcgtgacgcgaacgacaaagtgaaagcactgttgaaagataaagagatcagcgaagacgacgatcgccgttctcaggacgatgtacagaaactgactgatgctgcaatcaagaaaattgaagcggcgctggcagacaaagaagcagaactgatgcagttctgatttcttgaacgacaaaaacgccgctcagtagatccttgcggatcggctggcggcgttttgctttttattctgtctcaactctggatgtttcatgaagcaactcaccattctgggcagcaccggcagcattggttgcagcacgctggacgtggtgcgccataatcccgaacacttccgcgtagttgcgctggtggcaggcaaaaatgtcactcgcatggtagaacagtgcctggaattctctccccgctatgccgtaatggacgatgaagcgagtgcgaaacttcttaaaacgatgctacagcaacagggtagccgcaccgaagtcttaagtgggcaacaagccgcttgcgatatggcagcgcttgaggatgttgatcaggtgatggcagccattgttggcgctgctgggctgttacctacgcttgctgcgatccgcgcgggtaaaaccattttgctggccaataaagaaagtctggttacctgcggacgtctgtttatggacgccgtaaagcagagcaaagcgcaattgttaccggtcgatagcgaacataacgccatttttcagagtttaccgcaacctatccagcataatctgggatacgctgaccttgagcaaaatggcgtggtgtccattttacttaccgggtctggtggccctttccgtgagacgccattgcgcgatttggcaacaatgacgccggatcaagcctgccgtcatccgaactggagcatggggcgtaaaatttctgtcgatagcgctaccatgatgaacaaaggtctggaatacattgaagcgcgttggctgtttaacgccagcgccagccagatggaagtgctgattcacccgcagagtgtgattcacagtatggtgcgctatcaggacggcagtgttctggcgcagctgggggaaccggatatgcgtacgccaattgcccacaccatggcatggccgaatcgcgtgaactctggcgtgaagccgctcgatttttgcaaactaagtgcgttgacatttgccgcaccggattatgatcgttatccatgcctgaaactggcgatggaggcgttcgaacaaggccaggcagcgacgacagcattgaatgccgcaaacgaaatcaccgttgctgcttttcttgcgcaacaaatccgctttacggatatcgctgcgttgaatttatccgtactggaaaaaatggatatgcgcgaaccacaatgtgtggacgatgtgttatctgttgatgcgaacgcgcgtgaagtcgccagaaaagaggtgatgcgtctcgcaagctgaggataatccggctacagagagtcgcgctatttgttagcgtagggcttcagtgatatagtctgcgccatctgatcgtaagtagttggctttataaggtcagatatgccgtggttttacacggcttttttttgtataggcttcagtattcctgagtaccgtaaaccctgtcagggaataaaaaacgcgtgatgttgtctgctactcaaccacttagcgaaaaattgccagcgcatggctgccgtcatgttgcgatcattatggacggcaatggccgctgggcaaaaaagcaagggaagattcgtgcctttgggcataaagccggggcaaaatccgtccgccgggctgtctcttttgcggccaacaacggtattgaggcgttaacgctgtatgcctttagtagtgaaaactggaaccgaccagcgcaggaagtcagtgcgttaatggaactgtttgtgtgggcgctcgatagcgaagtaaaaagtctgcaccgacataacgtgcgtctgcgtattattggcgataccagtcgctttaacagccgtttgcaagaacgtattcgtaaatctgaagcgctaacagccgggaataccggtctgacgctgaatattgcggcgaactacggtggacgttgggatatagtccagggagtcaggcaactggctgaaaaggtgcagcaaggaaacctgcaaccagatcagatagatgaagagatgctaaaccagcatgtctgtatgcatgaactggcccctgtagatttagtaattaggactgggggggagcatcgcattagtaactttttgctttggcaaattgcctatgccgaactttactttacagatgttctctggcccgatttcgatgaacaagactttgaaggggcgttaaatgcctttgctaatcgagagcgtcgtttcggcggcaccgagcccggtgatgaaacagcctgatgggggtcgcttttgctgaagtatcgcctgatatctgcttttgtgttaatacccgtcgtcatcgcggcgttgtttctgttgccgccggtggggttcgccattgtaacgctggtggtctgcatgctggcagcgtgggaatggggacagcttagcggttttaccactcgtagccagcgagtatggttggcggtgttatgcgggttattgttggcgctgatgctttttctgttgccggaatatcaccgaaatattcatcaaccgctggttgaaatcagtctttgggctagcctgggttggtggattgtcgcgctattgctggtgctgttttacccaggttccgcagcaatctggcgtaactctaaaacattgcgccttatttttggcgtgctaaccattgttcccttcttctggggcatgctggcgttacgggcctggcactatgacgagaatcattacagtggcgcaatatggttgctctatgtcatgatcctggtatggggcgctgactccggcgcatatatgtttggcaaattgtttggtaaacataagctggcaccgaaggtttctccgggtaaaacctggcaaggctttatcggtggactcgctactgcagcggtaatcagttggggttatggcatgtgggcgaatctcgacgtcgctcccgtcaccttactcatttgctctattgtcgcagcgttagccagtgtgctcggcgatctgaccgagagtatgtttaagcgtgaagcaggaattaaggacagcggtcatttaattccaggacacggtggtattttagatcgtattgatagcctgacggctgcggtaccggtctttgcttgcttgttgttactggtattcaggacgctttaacggaaggtaatatgctgagttttctctgggatttggctagcttcatcgttgcactgggtgtacttatcaccgtgcatgaatttggtcatttctgggttgcccggcgttgtggtgttcgcgttgagcgtttcagtatagggtttggtaaggcgctctggcggcgaactgataagctcggcaccgaatatgttatcgccctgatcccgttgggcggttatgtcaaaatgctggatgagcgcgcagaaccggtcgttccggaactccgccaccatgccttcaataataaatctgtcggccaacgagcggcgattattgccgcaggtccggttgcaaacttcatttttgctatctttgcctactggctggtttttattattggtgtgcctggcgtacgtccggtggttggcgaaatagcagccaatagcatagctgcggaagcacaaattgcaccaggtacggaactaaaagccgtagatggtatcgaaacgcctgattgggatgccgtgcgtttgcagttggtcgataaaattggcgatgaaagcaccaccattacagtagcgccatttggcagcgaccaacggcgggatgtaaagctcgatttacgtcactgggcgtttgagcctgataaagaagatccggtatctagcctggggattcgtcctcgtgggccgcaaattgaacctgtactggaaaatgtgcagccaaacagcgcggcaagcaaggcaggtttgcaagcaggcgacaggatcgttaaagtcgatggtcagcccttaacgcagtgggtgacctttgtgatgcttgtccgggataacccgggtaaatccttagcgttagaaatcgaaaggcaggggagtcccttgtctttgacattaatcccggagagtaaaccgggtaatggtaaagcgattggttttgtcggtattgagccgaaagtcattcctttgccagatgagtataaagttgtacgccagtatgggccgttcaacgccatcgtcgaagccacggacaaaacgtggcagctgatgaagctgacggtcagtatgctgggaaaattgatcaccggtgatgtgaaactgaacaacctcagtgggccgatctctatcgccaagggggctgggatgacagcggaactcggggttgtttattacctgccgtttcttgcgcttattagcgtgaacttagggataattaacctgtttccgttgcccgtacttgacggggggcatctgctgttccttgcgatcgaaaagatcaagggcggaccggtatccgagcgggttcaagacttttgttatcgcattggcagcattctgctggtgctgttaatggggcttgcacttttcaatgatttctctcggttatgagagttagttaggaagaacgcataataacgatggcgatgaaaaagttgctcatagcgagcctgctgtttagcagcgccaccgtatacggtgctgaagggttcgtagtgaaagatattcatttcgaaggccttcagcgtgtcgccgttggtgcggccctcctcagtatgccggtgcgcacaggcgacacggttaatgatgaagatatcagtaataccattcgcgctctgtttgctaccggcaactttgaggatgttcgcgtccttcgtgatggtgatacccttctggttcaggtaaaagaacgtccgaccattgccagcattactttctccggtaacaaaagcgtgaaagatgacatgctgaagcaaaacctcgaggcttctggtgtgcgtgtgggcgaatccctcgatcgcaccaccattgccgatatcgagaaaggtctggaagacttctactacagcgtcggtaaatatagcgccagcgtaaaagctgtcgtgaccccgctgccgcgcaaccgtgttgacctaaaactggtgttccaggaaggtgtgagtgctgaaatccagcaaattaacattgttggtaaccatgctttcaccaccgacgaactgatctctcatttccaactgcgtgacgaagtgccgtggtggaacgtggtaggcgatcgtaaataccagaaacagaaactggcgggcgaccttgaaaccctgcgcagctactatctggatcgcggttatgcccgtttcaacatcgactctacccaggtcagtctgacgccagataaaaaaggtatttacgtcacggtgaacatcaccgaaggcgatcagtacaagctttctggcgttgaagtgagcggcaaccttgccgggcactccgctgaaattgagcagctgactaagatcgagccgggtgagctgtataacggcaccaaagtgaccaagatggaagatgacatcaaaaagcttctcggtcgctatggttatgcctatccgcgcgtacagagcatgcccgaaattaacgatgccgacaaaaccgttaaattacgtgtgaacgttgatgcgggtaaccgtttctacgtgcgtaagatccgttttgaaggtaacgataccagcaaagatgccgtcctgcgtcgcgaaatgcgtcagatggaaggtgcatggctggggagcgatctggtcgatcagggtaaggagcgtctgaatcgtctgggcttctttgaaactgtcgataccgatacccaacgtgttccgggtagcccggaccaggttgatgtcgtctacaaggtaaaagagcgcaacaccggtagcttcaactttggtattggttacggtactgaaagtggcgtgagcttccaggctggtgtgcagcaggataactggttaggtacaggttatgctgttggtatcaacgggaccaaaaacgattaccagacctatgctgaactgagcgtaaccaacccgtacttcaccgtagatggcgtaagcctcggtggtcgtctcttctataatgacttccaggcagatgacgccgacctgtccgactataccaacaagagttatggtacagacgtgacgttgggcttcccgattaacgaatataacagcctgcgtgcaggtctgggttatgtacataactccctgtccaacatgcagcctcaggttgcgatgtggcgttatctgtactctatgggtgaacatccgagcacctctgatcaggataacagcttcaaaacggacgacttcacgttcaactatggttggacctataacaagcttgaccgtggttacttcccgacagatggtagtcgtgtcaacctgaccggtaaagtgaccattcctggaagcgataacgaatactacaaagtgacgttagacacggcgacttatgtgccgatcgatgacgatcacaaatgggttgttctggggcgtacccgctggggttatggtgatggtttaggcggcaaagagatgccgttctacgagaacttctatgccggtggttccagcaccgtgcgtggcttccagtccaataccattggtccgaaagcagtttacttcccgcatcaggccagtaattatgatccggactatgattacgaatgtgcgactcaggacggcgcgaaagacctgtgtaaaagcgatgatgctgtaggcggtaacgccatggcggttgccagcctcgagttcatcaccccgacgccgtttattagcgataagtatgctaacagcgttcgtacttccttcttctgggatatgggtaccgtttgggatacaaactgggattccagccaatattctggatatccggactatagtgatccaagcaatatccgtatgtctgcgggtatcgcattacaatggatgtccccattggggccgttggtgttctcctacgcccagccgttcaaaaagtacgatggagacaaggcagaacagttccagtttaacatcggtaaaacctggtaagtgttctccacaaaggaatgtagtggtagtgtagcgatgactttaggcgatcaatataagatcgccgggccacgcaaagaactgcaccctccggtgcaaatgggatggtaaggagtttattgtgaaaaagtggttattagctgcaggtctcggtttagcactggcaacttctgctcaggcggctgacaaaattgcaatcgtcaacatgggcagcctgttccagcaggtagcgcagaaaaccggtgtttctaacacgctggaaaatgagttcaaaggccgtgccagcgaactgcagcgtatggaaaccgatctgcaggctaaaatgaaaaagctgcagtccatgaaagcgggcagcgatcgcactaagctggaaaaagacgtgatggctcagcgccagacttttgctcagaaagcgcaggcttttgagcaggatcgcgcacgtcgttccaacgaagaacgcggcaaactggttactcgtatccagactgctgtgaaatccgttgccaacagccaggatatcgatctggttgttgatgcaaacgccgttgcttacaacagcagcgatgtaaaagacatcactgccgacgtactgaaacaggttaaataagtaatgcctagtattcgactggctgatttagcgcagcagttggatgcagaactacacggtgatggcgatatcgtcatcaccggcgttgcgtccatgcaatctgcacaaacaggtcacattacgttcatggttaacccaaaataccgtgagcatttaggcttgtgccaggcgtccgcggttgtcatgacccaggacgatcttcctttcgcgaaaagtgccgcactggtagtgaagaatccctacctgacttacgcgcgcatggcgcaaattttagataccacgccgcagcccgcgcagaacattgcacccagtgcggtgatcgacgcgacggcgaagctgggtaacaacgtaagcattggcgctaacgcggtgattgagtccggcgttgaactgggcgataacgtgattatcggtgccggttgcttcgtaggtaaaaacagcaaaatcggtgcaggtagccgtctctgggcgaacgtaaccatttaccatgagatccagatcggtcagaattgcctgatccagtccggaacagtggtaggcgcagacggctttggttatgccaacgatcgtggtaactgggtgaagatcccacagattggtcgcgtaattattggcgatcgcgtggagatcggtgcctgcacaaccatcgatcgcggcgcgctggatgacactattattggcaatggcgtgatcattgataaccagtgccagattgcacataacgtcgtgattggcgacaatacggcggttgccggtggcgtcattatggcgggcagcctgaaaattggtcgttactgcatgatcggcggagccagcgtaatcaacgggcatatggaaatatgcgacaaagtgacggttacgggcatgggtatggtgatgcgtcccatcactgaaccaggcgtctattccagtggcattccgctgcaacccaacaaagtctggcgcaaaaccgctgcactggtgatgaacattgatgacatgagcaagcgtctgaaaagccttgagcgcaaggttaatcaacaagactaacgttccatcttttgttcgccaaactttacggcctgtctcattcttacgattgcggcaggccgtgttattattgtcgtttcttatattttgacaggaagagtatcttgactactaacactcatactctgcagattgaagagattttagaacttctgccgcaccgtttcccgttcttactggtggatcgcgtgctggattttgaagaaggtcgttttctgcgcgcagtaaaaaatgtctctgtcaatgagccattcttccagggccatttccctggaaagccgattttcccgggtgtgctgattctggaagcaatggcacaggcaacaggtattctggcgtttaaaagcgtaggaaaactggaaccgggtgagctgtactacttcgctggtattgacgaagcgcgcttcaagcgcccggtcgtgcctggcgatcaaatgatcatggaagtcactttcgaaaaaacgcgccgcggcctgacccgttttaaaggggttgctctggtcgatggtaaagtagtttgcgaagcaacgatgatgtgtgctcgtagccgggaggcctgatacgtgattgataaatccgcctttgtgcatccaaccgccattgtggaagagggcgcgagtattggcgcgaacgcacacattggtcctttttgtatcgttggaccccatgtcgaaattggtgagggtaccgtactgaaatctcacgttgtcgtgaatggtcatactaaaattggccgcgataatgagatttatcagttcgcctccatcggcgaagttaaccaggatctgaaatatgctggcgaaccgacccgtgtggaaatcggcgatcgtaaccgcattcgcgaaagcgtcaccattcatcgtggcacagtccagggcggtggattgacgaaggtgggcagcgacaacttactgatgatcaacgcgcacattgcgcacgattgtacggtaggtaaccgctgtattctcgccaacaacgcaacgctggcgggtcacgtaagcgttgacgacttcgcgatcatcggcggcatgaccgcagtccatcagttctgcatcattggtgcgcacgtgatggttggcggctgctccggtgtggcgcaggacgtccctccttatgtcattgcgcagggtaaccacgcaacgccgttcggtgtcaatatcgaagggctgaagcgccgcggattcagccgtgaggcgattaccgctatccgcaatgcgtataagctgatttatcgtagcggtaaaacgctcgatgaagtgaaaccggaaattgctgaactggcggaaacatatccggaagtgaaagcctttaccgatttctttgcacgcagtacgcgcggtctgattcgttaatgactgaacagcgtccattaacgattgccctggtcgccggagaaacctccggcgatatcctgggggccggtttaatccgcgctctgaaagaacatgtgcccaacgcccgctttgttggtgttgccgggccacgaatgcaggctgaaggctgcgaagcctggtacgaaatggaagaactggcggtgatgggcattgttgaagtgctcggtcgtctgcgtcgcttactgcatattcgtgccgatctgacaaagcgttttggcgaactgaagccagatgtttttgttggtattgatgcgcctgacttcaatattactcttgaaggtaacctcaaaaagcagggtatcaaaaccattcattacgtcagtccgagtgtctgggcgtggcgacagaaacgtgttttcaaaataggcagagccaccgatctggtgctcgcatttctgcctttcgaaaaagcgttttatgacaaatacaacgtaccgtgccgctttatcggtcataccatggctgatgccatgccattagatccagataaaaatgccgcccgtgatgtgctggggatccctcacgatgcccactgcctggcgttgctaccggggagccgtggtgcagaagttgaaatgcttagtgccgatttcctgaaaacggcccagcttttgcgccagacatatccggatctcgaaatcgtggtgccactggtgaatgccaaacgccgcgagcagtttgaacgcatcaaagctgaagtcgcgccagaccttagtgttcatttgctggatgggatgggccgtgaggcgatggtcgccagcgatgcggcgctactggcgagcggtacggcagccctggagtgtatgctggcgaaatgcccgatggtggtgggatatcgcatgaagccttttaccttctggttggcgaagcggctggtgaaaactgattatgtcagcctgccaaatctgctggcgggcagagagttagtcaaagaattattgcaggaagagtgtgagccgcaaaaactggctgcggcgctgttaccgctgttggcgaacgggaaaaccagccacgcgatgcacgataccttccgtgaactgcatcagcagatccgctgcaatgccgatgagcaggcggcacaagccgttctggagttagcacaatgatcgaatttgtttatccgcacacgcagctggttgcgggtgtggatgaagtcggacgcgggccgttagttggcgcggtcgtcaccgctgcggtgatccttgacccggcgcgcccgattgccgggctgaatgattccaaaaagctgagcgaaaaacgccgtctggcgctctatgaagagatcaaagagaaagcgttgagctggagtctgggccgcgcggaaccccacgaaatcgacgagctgaacattcttcatgcgaccatgctggcgatgcagcgtgccgtcgctgggctgcatattgcgccggaatatgtgttgattgatggtaaccgctgcccgaaattaccgatgcctgcgatggctgtggtgaaaggcgatagccgcgtaccggaaatcagtgccgcgtctatcctggcgaaagtgacgcgtgacgccgaaatggcggcgctggatattgttttcccgcaatatggttttgcccaacacaaagggtacccaaccgcttttcatctggaaaaactggctgaacacggcgcgaccgaacaccatcggcgcagctttgggcctgtcaaacgcgcactgggacttgcgtcctgattcttgtgtcgagattaagtaaaccggaatctgaagatgtctgaaccacgtttcgtacacctgcgggtgcacagcgactacagcatgatcgatggcctggccaaaaccgcaccgttggtaaaaaaggcggcggcgttgggtatgccagcactggcgatcaccgatttcaccaacctttgtggtctggtgaagttctacggagcgggacatggcgcagggattaagcctatcgtcggggcagattttaacgtccagtgcgacctgctgggtgatgagttaacccacctgacggtactggcggcgaacaataccggctatcagaatctgacgttgctgatcagtaaagcgtatcagcgcgggtacggtgccgccgggccgatcatcgatcgcgactggcttatcgaattaaacgaagggttgatccttctttccggcggacgcatgggcgacgtcggacgcagtcttttgcgtggtaacagcgcgctggtagatgagtgtgtcgcgttttatgaagaacacttcccggatcgctattttctcgagctgatccgcaccggcaggccggatgaagaaagctatctgcacgcggcggtggaactggcggaagcgcgcggtttgcccgtcgtggcgaccaacgacgtgcgctttatcgacagcagcgactttgacgcacacgaaatccgcgtcgcgatccacgacggctttaccctcgacgatcctaaacgcccgcgtaactatagcccgcagcaatatatgcgtagcgaagaggagatgtgtgagctgtttgccgacatccccgaagcccttgccaacaccgttgagatcgccaaacgctgtaacgtaaccgtgcgtcttggtgaatacttcctgccgcagttcccgaccggggacatgagcaccgaagattatctggtcaagcgtgcaaaagagggcctggaagagcgtctggcctttttattccctgatgaggaagaacgtcttaagcgccgcccggaatatgacgaacgtctggagactgaacttcaggttatcaaccagatgggcttcccgggctacttcctcatcgttatggaatttatccagtggagcaaagataacggcgtaccggtagggccaggccgtggctccggtgcgggtagtctggtggcctacgcgctgaaaatcaccgacctcgatccgctggaatttgacctgctgttcgaacgtttccttaacccggaacgtgtctccatgcctgacttcgacgttgacttctgtatggagaaacgcgatcaggttatcgagcacgtagcggacatgtacggtcgtgatgcggtaagccagatcatcaccttcggtacaatggcggcgaaagcggtgatccgcgacgtaggccgcgtgctggggcatccgtacggctttgtcgatcgtatcagcaaactgatcccgcccgatccggggatgacgctggcgaaagcgtttgaagccgagccgcagctgccggaaatctacgaagcggatgaagaagttaaggcgctgatcgacatggcgcgcaaactggaaggggtcacccgtaacgccggtaagcacgccggtggggtggttatcgcgccgaccaaaattaccgattttgcgccgctttactgcgatgaagagggcaaacatccggtcacccagtttgataaaagcgacgttgaatacgccggactggtgaagttcgacttccttggtttgcgtacgctcaccatcatcaactgggcgctggagatgatcaacaagcggcgggcgaagaatggcgagccgccgctggatatcgctgcgatcccgctggatgataagaaaagcttcgacatgctgcaacgcagcgaaaccacggcggtattccagcttgaaagccgcggcatgaaggacctgatcaagcgtctacaacctgactgcttcgaagatatgatcgccctagtggcactgttccgccccggtccgttgcaaagtgggatggtggataactttatcgaccgtaaacatggtcgtgaagagatctcctatccggacgtacagtggcagcatgaaagcctgaaaccggtactggagccaacctacggcattatcctgtatcaggaacaggtcatgcagattgcgcaggtgctttctggttataccctcggtggcgcggatatgctgcgtcgtgcgatgggtaagaaaaagccggaagagatggctaagcaacgttctgtatttgctgaaggtgcagaaaagaacggaatcaacgctgaactggcgatgaaaatcttcgacctggtggagaaattcgctggttacggatttaacaaaagccactctgcggcctatgctttggtgagttatcaagcgttatggctgaaagcgcactatcctgcggagtttatggcggcggtaatgaccgccgatatggacaacaccgagaaggtggtgggtctggtggatgagtgctggcggatggggctgaaaatcctgccaccagatataaactccggtctttaccatttccacgtcaacgacgacggcgaaatcgtgtatggtattggcgcgatcaaaggggtcggtgaaggtccgattgaggccatcatcgaagcccgtaataaaggcggctacttccgcgaactgtttgatctctgcgcccgtaccgacaccaaaaagttgaaccgtcgcgtgctggaaaaactgatcatgtccggggcgtttgaccgtcttgggccacatcgcgcagcgctgatgaacagcctgggcgatgcgttaaaagcggcagatcaacacgcgaaagcggaagctatcggtcaggccgatatgttcggcgtgctggccgaagagccggaacaaattgaacaatcctacgccagctgccaaccgtggccggagcaggtggtattagatggggaacgtgaaacgttaggcctgtacctgaccggacaccctatcaaccagtatttaaaagagattgagcgttatgtcggaggcgtaaggctgaaagacatgcacccgacagaacgtggtaaagtcatcacggctgcggggctcgttgttgccgcgcgggttatggtcaccaagcgcggcaatcgtatcggtatctgcacgctggatgaccgttccgggcggctggaagtgatgttgtttactgacgccctggataaataccagcaattgctggaaaaagaccgcatacttatcgtcagcggacaggtcagctttgatgacttcagcggtgggcttaaaatgaccgctcgcgaagtgatggatattgacgaagcccgggaaaaatatgctcgcgggcttgctatcagcctgacggacaggcaaattgatgaccagcttttaaaccgactccgtcagtctctggaaccccaccgctctgggacaattccagtacatctctactatcagagggcggatgcacgcgcgcggttgcgttttggcgcgacgtggcgtgtctctccgagcgatcgtttattaaacgatctccgtggcctcattggtagcgagcaggtggaactggagtttgactaatacaggaatactatgagtctgaatttccttgattttgaacagccgattgcagagctggaagcgaaaatcgattctctgactgcggttagccgtcaggatgagaaactggatattaacatcgatgaagaagtgcatcgtctgcgtgaaaaaagcgtagaactgacacgtaaaatcttcgccgatctcggtgcatggcagattgcgcaactggcacgccatccacagcgtccttataccctggattacgttcgcctggcatttgatgaatttgacgaactggctggcgaccgcgcgtatgcagacgataaagctatcgtcggtggtatcgcccgtctcgatggtcgtccggtgatgatcattggtcatcaaaaaggtcgtgaaaccaaagaaaaaattcgccgtaactttggtatgccagcgccagaaggttaccgcaaagcactgcgtctgatgcaaatggctgaacgctttaagatgcctatcatcacctttatcgacaccccgggggcttatcctggcgtgggcgcagaagagcgtggtcagtctgaagccattgcacgcaacctgcgtgaaatgtctcgcctcggcgtaccggtagtttgtacggttatcggtgaaggtggttctggcggtgcgctggcgattggcgtgggcgataaagtgaatatgctgcaatacagcacctattccgttatcagcccggaaggttgtgcgtccattctgtggaagagcgccgacaaagcgccgctggcggctgaagcgatgggtatcattgctccgcgtctgaaagaactgaaactgatcgactccatcatcccggaaccactgggtggtgctcaccgtaacccggaagcgatggcggcaagcttgaaagcgcaactgctggcggatctggccgatctcgacgtgttaagcactgaagatttaaaaaatcgtcgttatcagcgcctgatgagctacggttacgcgtaattcgcaaaagttctgaaaaagggtcacttcggtggcccttttttatcgccacggtttgagcaggctatgattaaggaaggattttccaggaggaacacatgaacatcattgccattatgggaccgcatggcgtcttttataaagatgagcccatcaaagaactggagagcgcgctggtggcgcaaggctttcagattatctggccacaaaacagcgttgatttgctgaaatttatcgagcataaccctcgaatttgcggcgtgatttttgactgggatgagtacagtctcgatttatgtagcgatatcaatcagcttaatgaatatctcccgctttatgccttcatcaacacccacagcacgatggatgtcagcgtgcaggatatgcggatggcgctctggttttttgaatatgcgctggggcaggcggaagatatcgccattcgtatgcgtcagtacaccgacgaatatcttgataacattacaccgccgttcacgaaagccttgtttacctacgtcaaagagcggaagtacaccttttgtacgccggggcatatgggcggcaccgcatatcaaaaaagcccggttggctgtctgttttatgatttttcggcgggaatactcttaaggctgatgtctctattagcgtcaccgagcttggtagcttgctcgaccacaccgggccacacctggaagcggaagagtacatcgcgcggacttttggcgcggaacagagttatatcgttaccaacggaacaagcacgagcaacaaaattgtgggtatgtacgccgcgccatccggcagtacgctgttgatcgaccgcaattgtcataaaagcctggcgcatctgttgatgatgaacgatgtagtgccagtctggctgaaaccgacgcgtaatgcgttggggattcttggtgggatcccgcgccgtgaatttactcgcgacagcatcgaagagaaagtcgctgctaccacgcaagcacaatggccggttcatgcggtgatcaccaactccacctatgatggcttgctctacaacaccgactggatcaaacagacgctggatgtcccgagcattcacttcgattctgcctgggtgccgtacacccattttcatccgatctaccagggtaaaagtggtatgagcggcgagcgtgttgcgggaaaagtgatcttcgaaacgcaaagcacccacaaaatgctggcggcgttaagccaggctagcctgatccacattaaaggcgagtatgacgaagaggcctttaacgaagcctttatgatgcataccaccaccagccccagttatcccattgttgctagcgttgagacggcggcggcgatgctgcgtggtaatccgggcaaacggctgattaaccgtagtgtagaacgagctctgcattttcgcaaagaggtccagcggctgcgggaagagtctgacggttggtttttcgatatctggcaaccgccgcaggtggatgaagccgaatgctggcccgttgcgcctggcgaacagtggcacggctttaacgatgcggatgccgatcatatgtttctcgatccggttaaagtcactattttgacaccggggatggacgagcagggcaatatgagcgaggaggggatcccggcggcgctggtagcaaaattcctcgacgaacgtgggatcgtagtagagaaaaccggcccttataacctgctgtttctctttagtattggcatcgataaaaccaaagcaatgggattattgcgtgggttgacggaattcaaacgctcttacgatctcaacctgcggatcaaaaatatgctacccgatctctatgcagaagatcccgatttctaccgcaatatgcgtattcaggatctggcacaagggatccataagctgattcgtaaacacgatcttcccggtttgatgttgcgggcattcgatactttgccggagatgatcatgacgccacatcaggcatggcaacgacaaattaaaggcgaagtagaaaccattgcgctggaacaactggtcggtagagtaagcgcaaatatgatcctgccttatccaccgggcgtaccgctgttgatgcctggagaaatgctgaccaaagagagccgcacagtactcgattttctactgatgctttgttccgtcgggcaacattaccccggttttgaaacggatattcacggcgcgaaacaggacgaagacggcgtttaccgcgtacgagtcctaaaaatggcgggataacttgccagagcggcttccgggcgagtaacgtgctgttaacaaataaaggagacgttatgctgggtttaaaacaggttcaccatattgcgattattgcgacggattatgcggtgagcaaagctttctactgcgatattcttggtttcacgctgcaaagcgaagtctatcgcgaagcgcgcgacagttggaaaggggatttggcgcttaatgggcaatatgtgattgagcttttcagttttccgttcccgccggaacgacccagccgaccggaagcttgcggtctgcgtcatctggcttttagcgttgatgacatcgatgcggcagtggcgcaccttgaaagccataacgtgaagtgtgaaaccatccgtgtcgatccatacacgcaaaaacgcttcaccttctttaacgatccggacgggctgccgttggaactgtatgagcagtaaggcttgtcatcgccgcatttgcccggtaacgtgccgggcattgctactgtaaaatcgcaccatcatgacactcacgctcaatagacaacttctcaccagtcgccagattctggtggcctttagcggcgggcttgactccaccgttctgctgcatcagttggtgcagtggcggacggaaaatccgggtgtcgctctgcgcgctattcatgtgcatcacggtttaagtgccaatgccgatgcctgggttacgcattgcgaaaacgtctgccaacagtggcaggtgccgctggtggtcgaacgcgtacaacttgcgcaagaaggactgggcattgaggcccaggcgcggcaggcacgttatcaggcatttgcccgcaccttgttgcccggtgaagtgctggtcaccgcgcaacatctcgacgatcaatgtgaaacctttctgctggcgctaaaacgcggcagtggccctgccgggcttagcgctatggcggaagtcagcgagtttgccggaacgcggcttattcgcccgttgctcgcccgcacgcggggggaactggtgcagtgggcgcgtcagtatgatttacgctggattgaagacgaaagtaatcaggacgacagttacgatcgtaactttctgcgcctgcgcgtagtgccgttattgcagcagcgttggccgcattttgccgaagcaacggcccgcagcgccgcactttgtgctgaacaagagagcctgctggatgaactgctggcagatgatttagcacactgtcaaagcccgcaggggacgctgcagattgtgccaatgctggcgatgagtgatgcccgccgcgcggcgattatccgccgctggctggcagggcagaatgcaccgatgccttcccgcgacgcgttggtgaggatctggcaggaagtggcgctggcgcgggaagatgccagtccctgtttacgtttgggcgcgtttgaaatccgacgctatcagagccaactgtggtggattaaatccgtcaccgggcaaagcgaaaacattgtgccgtggcagacgtggcttcaaccgctggaattaccggcggggctgggaagtgtacagcttaatgcgggaggcgatattcgccctccgcgtgcagacgaagcggtcagcgtgcgtttcaaagcgccaggattgctgcatattgtcgggcgtaacggcggacgtaagctaaagaaaatctggcaagagctgggcgtgccgccgtggctacgtgacaccacgccactgctgttttatggcgaaacgctgattgcggcggcaggggtatttgtgacgcaagaaggtgtggctgaaggtgagaatggcgtaagttttgtctggcagaaaacgcttagttaagtgaaagccggataagacgcatcaaacgtcgcatccggcgaaagtcaatcaggattcgcttaccaccaccgtaccgatttccgggtggctaaagctggtaattttatccagacgcagctcgcgggtttcgccagcggcctcgacgaccaggtactccacatttttgcgggagactaaatcactggcttttgcctgcaatttttcgccatctttcagctcaagtgtcagcattaaatgatgctggcaggcgagctcaagattatcgtaatcatcacaattgattggttgatacgtatcattcattgacataatcgctcaccagtaagtttgccgcagcgtatgctgctttttccctgacagcctcagaaagggcgtcgtcggcagccatttcattcagcactttcaaaacgcagcccagcgcgtccggaacgtatcctaagtctccgctggcgatttccgcgtaccgcttgcgtattaactcacaatatttttccacatgccctcctgtcagcactctgacttaaccgtggatgcaagtctaagcctacgaagataaactctgtttcgcaaggtgactataccacactcatttctgcaatatcagcgccgcaactgcacgtattccgttacaatggcctcctgattcgaaaggagttttcttatggcgcttaaagcgacaatttataaagcgacggttaatgtggccgatctcgaccgcaaccagtttctcgatgcctctctgacgctggcgcgccatcctagtgaaacccaggagcgtatgatgctgcgcttgctggcgtggctgaaatatgctgatgaacgtctgcaatttacccgtggtttgtgtgccgatgatgagccggaagcgtggctgcgtaacgatcacctgggcattgatttgtggattgagctggggctgccggatgagcggcggattaagaaagcctgcacccaggccgcagaagtggcgctgtttacctataatagtcgggcggcgcaaatctggtggcagcaaaatcagagcaaatgtgtgcagtttgccaatctttccgtctggtatctggacgatgaacaactggcgaaagtaagcgcctttgccgatcgtaccatgacgctgcaggcaacgattcaggatggcgtgatctggttaagcgatgataagaataatctggaagtgaacttaaccgcctggcaacaacctagttgaactaaaccgcctggcaacaaccttcatgattgtgatttcccgacatgttgctattcccgatggtgagcttgagatcaccgccattcgtgcgcagggcgcgggcgggcagcatgttaataagaccagtacggctattcatctgcgttttgacattcgggcgtccagcctgccagagtattacaaagagcgtctgctcgccgccagccatcatttgatcagcagtgatggcgtgattgtcattaaggcacaggaataccgcagtcaggaactgaaccgcgaagcagctctggcccggctggtggctatgattaaagaattaacaacagaaaaaaaagcccgacgacccacgcggcccacccgtgcaagcaaagagcgcaggctggcaagcaaagcacaaaaaagtagcgtgaaggcgatgcgcggcaaagtgcgcagcggtcgggaataaaaagaaggaatggatggtgaaaaaagcgatagtgacagcgatggctgtaatcagcctctttactctgatgggatgtaataatcgggccgaagtcgatacgctttctccggcgcaggctgccgaactgaaaccgatgccgcaaagttggcgcggcgtgctgccgtgtgccgattgcgaaggaatcgaaacctctctgttcctcgaaaaagacggaacatgggtgatgaatgagcgttatctcggtgctcgtgaagaaccttcctccttcgcttcctacggtacatgggcgcgaaccgctgacaagctggtattaaccgacagcaaaggtgaaaagagttattatcgggcgaaaggcgatgcgctggagatgctcgatcgtgaaggcaatccgattgaaagccagttcaactatacgctggaagcggcacaatccagtttacctatgacgccgatgaccctgcggggcatgtatttttatatggctgatgcggcgaccttcactgattgcgcgaccggaaaacgtttcatggtagcgaataacgcagagctggagcgtagctacctggctgcgcgcggtcacagtgaaaaaccggtgttactgagtgtagaaggtcactttacgcttgagggtaatccggataccggtgcgccgactaaagtattggcacccgatacggcagggaaattttaccccaaccaggattgcagtagtttggggcagtaacccgtcttgagacagaaacaaacgcaaaacaggccagaaggatatatttcaacattttgaatttgcacgttttttgtaggccggataaggcgtttacgccgcatccggcaatggtgctcaacgcctgatgcgacgctggcgcgtcttatcatgcctacgacccccctcataccttaaggcggataaggcatttactttatcaccgggtcaaaccaacaaagcgacccgccttgatataaatcccaggcttcaggtgcccaacatactgtaactgcgtttctggcttaaacgcagagacatcaccaatacgcatatgcatcagatcggcagggctaatccagccgctttgcgccagtgtaagtggatgcccggctttggcaaaggcatccgtgacaaattcgctacaaaaccagctctttttgtctccttcgcccacactgcttaactgcgctttcgccaggccgctgacgcactgttggcgaaaatcctcggagaacggattcagactgcacatctggcgagtcaccataaagggaataaattcgacaatgccgcgatagttataaccgctatctttgattttattggcaaacgcggtgatatctgtggcttgttgcggggtaagatccgggactcgtaagacgaaaagcttatcactatgcttcatcgcttttttaagggaaacgatctggacgccagcgcctgtcgcttctgcaacgttattatcacccagaaagattgcaacgtgactcacagaggaagtgctgaagacgcggattccaaaactggttaccccaaggctactggagaacagcaaatcgccgggtttgagatcaggtgccgttatttcttttatactttgttcggtgaaagagctttgatgctggaatttgacagcccatgtttttgcctcggcatctactgctgtggcacttgggtctggctggctgatatcaacggtacaagcgctaagtaaaagaaagctggggagaaacaggcggcagtacgcctttggtttatccattttatacaatccatgtaaaaaaagggccctgaaattcaggaccctttctggcatcagcctttaatctgtttcaccagatattcgacgatgtcaccagtcttaattaactgtttctcgccgttgcgacgatatttatattcgatatcgtcgttgtcgaggttacggtcgcccagcacaatagtgtgcggaataccgatcagttccatatcagcaaacatcacgcccggacgctctttgcggtcatccagcagcacttcgataccttgtgcacgcagttcgctgtacagtttctcagcaagctcttgtacgcggaaggatttgtgcatgttcatcggcagaatcgccacctggaacggcgcgatagcgtcaggccatacgatgcctcgttcgtcgtagttctgctcaatcgccgcagctaccacacgcgttaccccgataccgtagcaacccatcgtcaggatttggttgcggccatcttcaccctgtacggaggctttcagtgcttcggagtacttggtacccagctggaagatgtgaccaacttcgataccacgtttgatcagcagcctaccctggccatccgggcttggatcgccagccaccacgttacggatatctgcaacttccggggtagcgacatcgcgatcccagttgatgccgaagtagtgtttaccatcgatgttagcaccagcagcgaaatcactcatcgccgcaacggtacggtcaatcaccaccggaatcggcatgtttaccggacccagactacccggaccggctttaaccacggcacgaatttcttcttcggtcgcgaaagtcagcgggcttgcaacctgcggcagtttttctgctttaacttcgttcagctcgtgatcaccgcgcaccagcagcgcaacctgcgggaagctgctgccttcaaccgctttaaccagcagagtcttaaccgttttctcaatcggcagattgaactgttcaaccagttccgcgatggttttcgcgttcggcgtatcaaccagcgtcatttcctgggtagcagcagcgcgcggttctttcggcgcgatagcttctgccagttcaatgttcgctgcatagtcagaggtgtcggagaagaccacatcgtcttcaccgctctgcgccagcacctggaattcgtgagaggcgctgccgccgatagaaccggtgtcggcttgtacggcgcggaaatccagccccatgcggctgaagattttgctgtaggccgcatacattgcatcgtaggtttcctgcagggattcctgagaagtatggaaagagtaagcatctttcatcaggaattcgcgggaacgcatgacgccgaaacgcggacgcacttcgtcgcggaacttggtctggatctgatagaagttcagcggcagctgtttgtaagagctaagctcgttacgaatcaggtcagtgataacttcttcatgagttgggccgagtacgaacggacgctcgccacggtcaacaaaacgcagcagttccggaccgtactgttcccaacgaccactctcttgccacaaatcggctggctgaaccaccggcatgctcacctcgatcgcaccggcgttgttcatctcttcacgcacgatgttttcgacttttttcagaacgcgcacgccggtcggcagccaggtatataacccggaggccagcttgcggatcatcccggcgcgcagcatcagctgatggctgatcacctcggcgtcggcaggtgtctccttgagagtggagagcaggtattggctagtacgcatgttgttacggttccagttggaaggtagaacaggctcaaggcgagcctgggacaaaaaaagtgatttagtttaccagtgcaaaagaaatgtcaaaagagaagggcgtgaatttaacgcggttccagcgcaaagacttcaaaacctgcgtcggtgacgcgccagcgaacgttaaaatcatgtagccagacggcataggttttgcccgtttcctcacctttacgataggccgggcgcgggtcctgcgccagtacttcgcggataaacagcgttaactgcggataacgcttctccagcgtcaaaagctgcttttcgacctctgcggtaaaactcaccgccatctctgcagctggcgcactttgcgcatagctggcactggcatcgggaaggctttcggcaaaggggagatacggtttgatatccactaccggcgtaccatcgaccagatccagactgccgagcttcagaatcacgctgtctttatggcaaacaacctctttcagctctaccaggctcatgccaattgggttagggcggaaagtagagcgtgttgcgaaaacccccattctggcgttaccgccgaggcgcggtggacgcacagtcggacgccagccgccttccatcgtttgatgaaagacgaaaaggatccataaatggctgaacgcttccaggccgcgaacggcgtcggcctggttgtagggagcaatgagatgcagttcgccgttggcgctttttaccagacctggctggcgcggaacggcgaacttttctttataggggctgcgaataacgcctatttgctcgaactggaaactgctcatttcgccgtaatgttaagcgcagaaccgatacatacagcctgacgatagcagcctggcgtaccgctggtgacttcgcagctatgcagtaatacagcattggctttcattttagaggcgttgatttgcatccgcttacgtgcggttggaatgctcggcggagagtcctgattagaggcctggcaagagtcgccactgacttcaccgagatcgcggaacggtttgccgactaattcttctgcattggtataaattcggaccggcgtggcgcgcggcgctttcggttttgcaggctccgctttcggctggggtgcagtgctttgaacgggttcgacaggggatctgcttaacatggaacagccgcttagcatgagtgctactaaacagatcggtaaagcacgcatagtatttcctcaatgtatgatcaaaacgtcaatattgaatcaggagcttgtaaaaatgacaagacgggcaagcgcccgtcctgaatgatattacaaattgtggaaacagcctaaaaattaccagcctttaacagctccgccgttaaacactttgtttgctgcttcgtaaacttcgtcagactgataagcctggacgaatttcttcacgttctcggcgtctttgttatcttcacgcgtcacgatcaggtttacgtacggggactctttatcttcaacaaagataccgtctttcgccggagtcaggccaatctggctggcataggtggtattgataactgccagagcgatttgcgcgtcgtccagagaacgcggcagttgcggtgcttccagttcaacaattttcagatttttggggttctcaacaacatcaagaacggtcggcagcaggccaacgccatctttcagtttgatcaagcccactttttgcagcagcagcagactacgaccaaggttagttgggtcgtttggcacggcaacctggctaccatcctgcagttcatccagacttttgattttcttggagtaaccagcaatcggataaacaaaagtgttgcctactgcgaccagtttgtagccacgatctttcagttgctgatcaaggtacggtttatgctggaaggcgttggcgtcgatatcgcctttgctcaatgcttcgtttggcagaacatagtcgttgaaggttaccagctcaacgtccaggccatatttgtctttcgcaactttctgcgcgacttctgcaacctgctgttcggcaccaacaatcacgccgactttaatgtggtttggatctttttcatcctgaccgcagcctaccagtgccagacttccgatcagggctcccactgccgcaaaggttttgaatttgaacgccataccttattccttcttcaattatttatgttgtgttgaacgttacttgcgagtgacagcccggacgatgcggtcgcctgcgaactgaattaaataaaccagaatgaccagcaataccagtaccgtattcatcaccgtcgcgttatagccgatgtagccatactgatagccaatctgacctaaaccaccggcaccgactgcaccacccatcgcggaataaccgaccagggtaatcagggtgatagttgccgcattcaccagacccggcagcgcttccggtaacagcaccttacggacgatctgcatcggcgtggcacccattgcgcgggaagcttcaattaacccggttgggatctccagcagagcgttctcgaccatacgggcaataaacggtgctgcaccaacggttaacggaacaatcgctgcctgcaaaccaatgcttgtaccgacaataacgcgggtaaacggaatcatccatacaagcaagataatgaacgggatggaacggaaaatgttcacaatcgcagaaacggtacgatacagcttcgcgttagcaataatttgccccggacgcgtgacataaagcagaacgccaaccggcagaccaatcacaaagccaaaaaaaccggatacgaaggtcattgccagcgtttcccatacgccacgaaccagcagccacatcatcggctcagacataacccagtacctctacttttacatggtgttcctgcagccaggcaatggcggcttgcgtatcttgttgtgtgccgtgcatttcagtcagcatgatgccgaacttaacgccaccggcgtaatccatctgcgcgctaataatgttgttgttgacgttgaaacgacgcgcggtttcagaaagcagtggggcatcgacgctttgaccggtaaactccagacgcagcatcggcacgcagtcagtaaatggctccgcttgcagacgttcctggtaatcttccgggatatccagatgcagggtgctctgaataaacttctgcgccagcggcgttttcggatggctgaacacttcacttaccgtgtcctgctcgatcagttctccattgctgatgaccgccacgcaatcacaaatgcgcttcacaacgtccatttcgtgggtgatcaacagaatcgtcaaccccagacggcggttgatgtctttcagcagttcgagaatagaacgtgtcgttgccgggtccagcgcgctggtggcttcatcacacagcaatactttgggattgctggctaacgcacgggcaattgccacacgttgtttctgcccaccggaaagattgctcgggtagctatcatgcttatcgccaagaccaaccaaactcagcaattccgtcacgcgacgtttgacctcgtctttcggtgtgttgtccagctccagcggcagagccacgttgccaaaaacagtacggctagagagcaggttaaaatgctggaaaatcataccaatctggcggcgagctttggtcaactcggattcactcagcgtggtcagttcctggccatcgaccagcacgctaccctcggttgggcgctccagcaggtttacacaacgtataagcgtactcttacccgcgccactggcaccgataacgccataaatttgtccagctggcacatgcaggctgacgttgttcaacgcctggatggtgcgggtgccctggtggaacactttggtgatattgctaagttttatcattgattatttattatcgtcattaagttagtcgtggcatctcgaatgcctgaaacgggcaacgccgtcaatgaaatggatgttaaggcatccagacgtctaaatcaatcaggtttatgcgaagagcactttcttgcaggtcgaaacatgcgatactagcgtcacatgccttattaaggagctataaaaggtggcgaagagcgtacccgcaatttttcttgaccgtgatggcaccattaatgtcgatcacggctatgtccatgagatcgacaactttgaatttatcgacggtgttattgacgccatgcgcgagctaaaaaaaatgggctttgcgctggtggtagtaaccaaccagtctggcattgctcgcggtaaatttaccgaagcacagtttgaaacgctgaccgagtggatggactggagcctggcggaccgagatgtcgatctggatggtatctattattgcccgcatcatccgcagggtagtgttgaagagtttcgccaggtctgcgattgccgcaaaccacatccggggatgcttttgagtgcacgcgattatttgcatattgatatggccgcttcttatatggtgggcgataaattagaagatatgcaggcagcggttgcggcgaacgtgggaacaaaagtgctggtgcgtacgggtaaacctattacgcctgaagcagaaaacgcggcggattgggtgttaaatagcctggcagacctgccgcaagcgataaaaaagcagcaaaaaccggcacaatgattaaaagatgagcggttgaaataaaaatgcatttttccgcttgtcttcctgagccgactccctataatgcgcctccatcgacacggcggatgtgaatcacttcacacaaacagccggttcggttgaagagaaaaatcctgaaattcagggttgactctgaaagaggaaagcgtaatatacgccacctcgcgacagtgagctgaaagccgcgtcgcaactgctctttaacaatttatcagacaatctgtgtgggcactcgaagatacggattcttaacgtcgcaagacgaaaaatgaataccaagtctcaagagtgaacacgtaattcattacaaagtttaattctttgagcatcaaacttttaaattgaagagtttgatcatggctcagattgaacgctggcggcaggcctaacacatgcaagtcgaacggtaacaggaagaagcttgcttctttgctgacgagtggcggacgggtgagtaatgtctgggaaactgcctgatggagggggataactactggaaacggtagctaataccgcataacgtcgcaagaccaaagagggggaccttcgggcctcttgccatcggatgtgcccagatgggattagctagtaggtggggtaacggctcacctaggcgacgatccctagctggtctgagaggatgaccagccacactggaactgagacacggtccagactcctacgggaggcagcagtggggaatattgcacaatgggcgcaagcctgatgcagccatgccgcgtgtatgaagaaggccttcgggttgtaaagtactttcagcggggaggaagggagtaaagttaatacctttgctcattgacgttacccgcagaagaagcaccggctaactccgtgccagcagccgcggtaatacggagggtgcaagcgttaatcggaattactgggcgtaaagcgcacgcaggcggtttgttaagtcagatgtgaaatccccgggctcaacctgggaactgcatctgatactggcaagcttgagtctcgtagaggggggtagaattccaggtgtagcggtgaaatgcgtagagatctggaggaataccggtggcgaaggcggccccctggacgaagactgacgctcaggtgcgaaagcgtggggagcaaacaggattagataccctggtagtccacgccgtaaacgatgtcgacttggaggttgtgcccttgaggcgtggcttccggagctaacgcgttaagtcgaccgcctggggagtacggccgcaaggttaaaactcaaatgaattgacgggggcccgcacaagcggtggagcatgtggtttaattcgatgcaacgcgaagaaccttacctggtcttgacatccacagaactttccagagatggattggtgccttcgggaactgtgagacaggtgctgcatggctgtcgtcagctcgtgttgtgaaatgttgggttaagtcccgcaacgagcgcaacccttatcttttgttgccagcggtccggccgggaactcaaaggagactgccagtgataaactggaggaaggtggggatgacgtcaagtcatcatggcccttacgaccagggctacacacgtgctacaatggcgcatacaaagagaagcgacctcgcgagagcaagcggacctcataaagtgcgtcgtagtccggattggagtctgcaactcgactccatgaagtcggaatcgctagtaatcgtggatcagaatgccacggtgaatacgttcccgggccttgtacacaccgcccgtcacaccatgggagtgggttgcaaaagaagtaggtagcttaaccttcgggagggcgcttaccactttgtgattcatgactggggtgaagtcgtaacaaggtaaccgtaggggaacctgcggttggatcacctccttaccttaaagaagcgtactttgcagtgctcacacagattgtctgatgaaaatgagcagtaaaacctctacaggcttgtagctcaggtggttagagcgcacccctgataagggtgaggtcggtggttcaagtccactcaggcctaccaaatttgcacggcaaatttgaagaggttttaactacatgttatggggctatagctcagctgggagagcgcctgctttgcacgcaggaggtctgcggttcgatcccgcatagctccaccatctctgtagtggttaaataaaaaatacttcagagtgtacctgcaaaggttcactgcgaagttttgctctttaaaaatctggatcaagctgaaaattgaaacactgaacaatgaaagttgttcgtgagtctctcaaattttcgcaacacgatgatggatcgcaagaaacatcttcgggttgtgaggttaagcgactaagcgtacacggtggatgccctggcagtcagaggcgatgaaggacgtgctaatctgcgataagcgtcggtaaggtgatatgaaccgttataaccggcgatttccgaatggggaaacccagtgtgtttcgacacactatcattaactgaatccataggttaatgaggcgaaccgggggaactgaaacatctaagtaccccgaggaaaagaaatcaaccgagattcccccagtagcggcgagcgaacggggaggagcccagagcctgaatcagtgtgtgtgttagtggaagcgtctggaaaggcgcgcgatacagggtgacagccccgtacacaaaaatgcacatgctgtgagctcgatgagtagggcgggacacgtggtatcctgtctgaatatggggggggaccatcctccaaggctaaatactcctgactgaccgatagtgaaccagtaccgtgagggaaaggcgaaaagaaccccggcgaggggagtgaaaaagaacctgaaaccgtgtacgtacaagcagtgggagcatgcttaggcgtgtgactgcgtaccttttgtataatgggtcagcgacttatattctgtagcaaggttaaccgaataggggagccgaagggaaaccgagtcttaactgggcgttaagttgcagggtatagacccgaaacccggtgatctagccatgggcaggttgaaggttgggtaacactaactggaggaccgaaccgactaatgttgaaaaattagcggatgacttgtggctgggggtgaaaggccaatcaaaccgggagatagctggttctccccgaaagctatttaggtagcgcctcgtgaactcatctccgggggtagagcactgtttcggcaagggggtcatcccgacttaccaacccgatgcaaactgcgaataccggagaatgttatcacgggagacacacggcgggtgctaacgtccgtcgtgaagagggaaacaacccagaccgccagctaaggtcccaaagtcatggttaagtgggaaacgatgtgggaaggcccagacagccaggatgttggcttagaagcagccatcatttaaagaaagcgtaatagctcactggtcgagtcggcctgcgcggaagatgtaacggggctaaaccatgcaccgaagctgcggcagcgacgcttatgcgttgttgggtaggggagcgttctgtaagcctgtgaaggtgtactgtgaggtatgctggaggtatcagaagtgcgaatgctgacataagtaacgataaagcgggtgaaaagcccgctcgccggaagaccaagggttcctgtccaacgttaatcggggcagggtgagtcgacccctaaggcgaggccgaaaggcgtagtcgatgggaaacaggttaatattcctgtacttggtgttactgcgaaggggggacggagaaggctatgttggccgggcgacggttgtcccggtttaagcgtgtaggctggttttccaggcaaatccggaaaatcaaggctgaggcgtgatgacgaggcactacggtgctgaagcaacaaatgccctgcttccaggaaaagcctctaagcatcaggtaacatcaaatcgtaccccaaaccgacacaggtggtcaggtagagaataccaaggcgcttgagagaactcgggtgaaggaactaggcaaaatggtgccgtaacttcgggagaaggcacgctgatatgtaggtgaagcgacttgctcgtggagctgaaatcagtcgaagataccagctggctgcaactgtttattaaaaacacagcactgtgcaaacacgaaagtggacgtatacggtgtgacgcctgcccggtgccggaaggttaattgatggggttagcgcaagcgaagctcttgatcgaagccccggtaaacggcggccgtaactataacggtcctaaggtagcgaaattccttgtcgggtaagttccgacctgcacgaatggcgtaatgatggccaggctgtctccacccgagactcagtgaaattgaactcgctgtgaagatgcagtgtacccgcggcaagacggaaagaccccgtgaacctttactatagcttgacactgaacattgagccttgatgtgtaggataggtgggaggctttgaagtgtggacgccagtctgcatggagccgaccttgaaataccaccctttaatgtttgatgttctaacgttgacccgtaatccgggttgcggacagtgtctggtgggtagtttgactggggcggtctcctcctaaagagtaacggaggagcacgaaggttggctaatcctggtcggacatcaggaggttagtgcaatggcataagccagcttgactgcgagcgtgacggcgcgagcaggtgcgaaagcaggtcatagtgatccggtggttctgaatggaagggccatcgctcaacggataaaaggtactccggggataacaggctgataccgcccaagagttcatatcgacggcggtgtttggcacctcgatgtcggctcatcacatcctggggctgaagtaggtcccaagggtatggctgttcgccatttaaagtggtacgcgagctgggtttagaacgtcgtgagacagttcggtccctatctgccgtgggcgctggagaactgaggggggctgctcctagtacgagaggaccggagtggacgcatcactggtgttcgggttgtcatgccaatggcactgcccggtagctaaatgcggaagagataagtgctgaaagcatctaagcacgaaacttgccccgagatgagttctccctgactccttgagagtcctgaaggaacgttgaagacgacgacgttgataggccgggtgtgtaagcgcagcgatgcgttgagctaaccggtactaatgaaccgtgaggcttaaccttacaacgccgaagctgttttggcggattgagagaagattttcagcctgatacagattaaatcagaacgcagaagcggtctgataaaacagaatttgcctggcggccgtagcgcggtggtcccacctgaccccatgccgaactcagaagtgaaacgccgtagcgccgatggtagtgtggggtctccccatgcgagagtagggaactgccaggcatcaaattaagcagtaagccggtcataaaaccggtggttgtaaaagaattcggtggagcggtagttcagtcggttagaatacctgcctgtcacgcagggggtcgcgggttcgagtcccgtccgttccgccacttattaagaagcctcgagttaacgctcgaggttttttttcgtctgtatatctattattgccagaatcgcaaaaatcctctgcattttacgctctttttcctcaacagtctgaagcccataatcacctcagttaacgaaaatagcattaaaagaggcatattatggctatccctgcatttggtttaggtactttccgtctgaaagacgacgttgttattagttctgtgataacggcgcttgaacttggttatcgcgcaattgataccgcacaaatctatgataacgaagccgcagtaggtcaggcgattgcagaaagtggcgtgccacgtcatgaactctacatcaccactaaaatctggattgaaaatctcagcaaagacaaattgatcccaagtctgaaagagagcctgcaaaaattgcgtaccgattatgttgatctgacgctaatccactggccgagtccagacgatgaagtctctgttgaagagtttatgcaggcgctgctggaagccaaaaaacaagggctgacgcgtgagatcggtatttccaacttcacgatcccgttgatggaaaaagcgattgctgctgttggtgctgaaaacatcgctactaaccagattgaactctctccttatctgcaaaaccgtaaagtggttgcctgggctaaacagcacggcatccatattacttcctatatgacgctggcgtatggtaaggccctgaaagatgaggttattgctcgtatcgcagctaaacacaatgcgactccggcacaagtgattctggcgtgggctatgggggaaggttacagtgtaattccttcttctactaaacgtaaaaacctggaaagtaatcttaaggcacaaaatttacagcttgatgccgaagataaaaaagcgatcgccgcactggattgcaacgaccgcctggttagcccggaaggtctggctcctgaatgggattaagcctctctgacagctcctccgggagctgtttttacatgctcgctaaggaaatcgataaaagcccggatgcgcgtacttaccgcacggtcgctgtaatagacggcactgaatggcatttccactggcaacactttatctgccattaactccaccaattctccgcgagcgatttctttgtcgatcatgtagtcggacaaacacgcaatcccgttgccactcaggcaaagctgtttcagtgtttccccactattggaactcaaaccgtacttcacctcatgtaattgtccatcgctacgggctatcggccaggtattgagggaagcgggttcagtgaatcccaggcaaatatgttgctttaaatcgtcgatcgtttctggcttcccgtagcgggaaatataatcgggggaggcgataatttttcgataactgttaaataacggcctggcacgtaagctggaatccgttaacgtaccagcgcgtatcgcgacatccacttttctttcgatcaaattaataatcgtttcggaggagactaggctcaaagtgacttccggatagcgttcacggaaaggcttaattaacggcatcagaaagtgcagcaccactggagttgcggcatcgatccgtaacagtccacgcggtgtattacgcgtctccataatttcactttctgccgctgccatctcctgcaaaatactctgtacgcgacgaaaataacgctcgccttcttccgtcaggctaagttgtcgcgtggtccgattaagcaggctaacgccaagtttcatctccagctttttcaccgcccggcttaccgcactgtttgcttgccctaattgttccgctgcccggctaaagctgccgctttcgacgacgctaacaaaaatggcgagttcttcgctcgtggctttcatttttgctcctgttgcaaaatagaagagatattttgaatttatttgtcattaaaccatcaggatgcgtgatatgtcatgcgatttaatgttctccataatgagcaaaattctgaccggtgtaagcacttgcttacataacaatatacaattgctcgttgaaagagtgagctaaaatccctataacagtagaaccctcccgagtgcggaagggttgacgtaatagaggtttcaaagtcaaaagtgcgaaaaaacacctatgccatgcgctatgttgccggacaacctgcggaaaggatcttaccgccggggtcttttgcgagcatcggccaggcattaccacctggggaaccgttaagtaccgaagagcgtattcggatcctggtgtggaacatatacaaacagcaacgcgctgaatggttgagcgtattaaagaactacggcaaagatgcacatctggtgttattgcaggaagcgcagacaacgccagagttagtacagtttgcgaccgctaactatcttgccgccgatcaggtacccgctttcgtgctgccacaacatccttctggcgtaatgacccttagcgcggcacatccagtgtattgctgcccgttacgtgaacgagaacccattttgcgtctggcgaagagcgcactggtgacggtctatccattacctgacacccgcctgttgatggtggttaatatacacgccgtcaacttcagtctgggcgtggatgtctatagtaagcagttacttcctattggcgatcagatagctcaccacagcggcccggtcattatggcgggagatttcaatgcctggagccgtagaaggatgaacgcgttatatcgctttgcgcgggaaatgagcctgcgccaggtgcgttttaccgatgatcagcgccgtcgggcgtttggtcgcccgctcgattttgttttctaccgtggtctgaacgtcagtgaagcttctgtactggttacgcgcgcttccgatcacaatccgctactcgttgaattcagtcccggcaagcctgataaataaggtatgagtggtctgccacagggcagaccaacgtttggcgctgcgcaaaacgtgagcgcggtggtggcgtatgacttatctgcccacatgctggatgtcgtggcacaagctgccgaagcccggcaactgaaaaatatcaccacccgccagggatatgccgaaagtctgccatttgccgataacgcatttgatattgttatcagccgttattctgcccatcactggcatgatgttggtgcagcactgcgagaagtgaataggatattgaaacctggcggtaggctgattgtgatggacgtaatgtctccgggtcacccagtgcgcgacatctggttacagacggtagaagcattacgcgatacctctcacgtacgaaactacgccagcggtgagtggttgacgttaatcaatgaagccaatctgatagttgataatttaattacagataagttaccgctggaattttctagttgggtcgcgagaatgcgtacgccagaagcgttagtagacgctattcgcatttaccaacagagcgcaagcacagaggtgagaacgtattttgccttgcagaatgatggctttttcaccagtgatatcatcatggtagatgcacataaagcggcataaataaaaaaggcaccgggggaatcggtgcctttttattatctggtttgtcaggaatctggcatgttgttgtttttcacaaacaacgtcagcttatcgcctggttgcagattcgcagtgtcgctgttccagcgcatcacatctttgatgttcacgccgtggcgtttagcaatgctactaaggctatcgcctttgcgcacacgatacgtaatgctatcgctgttgtttgccagtcgctgtgcgctactgcctgcaccaatcgtcaaactttggcctggcttcagcttagatccgcgcagtttgttccactgctgcaaatctttggtgcttacgccgagacgactagcgatactactaagcgtgtcgccagagcgtacggtgtaaacacggctgttaagcggcgtattgtcggcaaccagcgtgctctgtacagcagcaatttcgccactagccagagattcacgcagttgatctgcatgcttctttggcaccatcacgtactgcgggccacttgcgcccagcgtggagccttttacgccagcgttgaatgtcttcagcttgctgacggaaatccccgccatatctgctaccttcgccatttcaaccgggctgctcaggtgcacacgcgccagagcacggctttcatcggtcgttggcagacgtacgccataacgcttgctgtttttgagaatatcactcaatgccagcattttaggcacgtactgcttcgtttcctgcggcaacggtaagctccagaagtccgtggatttcccacgcgctttgttcgttttaattgccttcatgacccgaccttcgccgctgttataagccgctacggtcagaagccagtcgccgtcaaacattttgttcagacgctgcatcatattcagcgcggcagttgcactagcaacaacatcgcgacgcgcgtcataattgcgggtctgtttcaaaccataattgcgccccgtgctcggaatgatctgccagatgcctgcggcattggcgccagacgttgcgtgaggatcaaaagcgctctccactatgggtagtagtaccagttccataggcatgttacgttttttaacttgccctgctatccagtacatatacggctctgcccgtaaagttacatcgtggagatagctcttattgcgtaaatatttctgtttctgttcgcgaatccggtcattttccggaattcccatctttagctcgtcgccaatgaaagcccacaagtcaccatctggcgcgatagacgtcccatcgtccatccatcgtgcctgacttgtaaactttgctgcttccccttgaccagctgcagaaaggctctgtgcgtgctgttgaacgttgccggtactctggcaacccacgagcaggacagaggcgagtaatatcgcttttgccttcatgtgtgtgtcaatagttgcttaaaagacgaccgatcataacggcgaacggagccgatgacaagaaagttttatcagaacctatctttcttactccttaaccatgcaaaacgctcttcaggttgttgcaataatgtttcttcattaattacattaattaaatcaatatcttccgttcttaaaaaaacattaatttgccgctcatttttcagaattacgggtagtgttatttgattttttgcccgtaactccttaactttacgataataatcatttatggacaaatcgtgcggaagaatactcaaagcaaacttcatattacttaaggtatattcatgagcacaacataccaatgtatcgtcaggtaacgcacttaactttttaagactttgatacatttgacttgctgtcccttcaaacaaccgaccacacccaccagaaaacagtgtgtcgccgcaaaatagataaggtttactgaagtaacagatatgtcctaaagtgtgacccggcgtagcaattacactaaattcatgccccaaaacgaaggcagtttcgccatctttgactacctgtgttgttcccttatcttgtgtctcttgtggaccatacaccacaatttgtggaaacttttccaccagttcttttacgccgccaacgtgatcgtggtgatggtgggtgagaaatatggcctccggttgccagttattggcggcaatggcgtttaatactggctctgcgtctccgggatcgacaatcaggcagcgacctgcttcatcattcaaaacccagatgtaattgtcatcaaaggcgggaatactgttaagattcatagattacctctcagtgtgaaacggaaggttgtgatgaaaccggcaagagtccctcaaactgtcgtggctcctgattgctggggcgatttgccctggggaaagctttatcgcaaggcgctggagcgccagctcaacccgtggttcactaaaatgtatggttttcatctgcttaagattggcaatttaagcgcagaaatcaattgcgaagcgtgcgcggtttctcatcaagtgaatgtttctgcgcaaggaatgcccgtccaggtacaggcggacccacttcatcttccttttgccgataaatccgttgatgtttgtctactggcacatacattgccgtggtgcaccgatccgcatcgtttattgcgtgaagccgatcgggtattgattgatgatggctggctggtcattagtggcttcaatcccatcagttttatgggattacgcaaacttgtgccggtattgcgcaaaaccagcccctataacagccggatgtttactctgatgcggcagctggactggctctctttgttgaattttgaagtgctacacgccagccgtttccacgttctcccgtggaacaaacacggaggaaaactattgaatgcgcatattcctgcgcttggttgcttacaacttattgttgcccggaaacggactattcctttaacgctaaatccgatgaaacagagtaaaaacaagccacgaattcgccaggcggttggagccacccggcaatgtcgtaaaccacaggcttaaacttcaacttggtagcctgtatcttccagtgtgggattcatcgccgcggcacgagccagttcatcacagcgttcgttttccgggtgtccggcatggcctttaacccattcccatttgatttgatgctgccccaatgcagcatcaagacgttgccagagatcgacattttttactggttttttgtctgcggttttccagccacgttttttccagttatggatccactgggtgataccctggcggacatactggctgtcggtactcaaaatgacttcgcaatgttcttttaacgcctccagcgcgacaatagcggccatcaactccatacggttgttggtggtgcgggtgtagccagcgctaaaggttttctcgcgtccgcgatagcgtaaaatagcgccgtaacccccaggtcctggattgcccagacagctaccatcggtgaaaatttctacctgtttaagcatctctggtagacttcctgtaattgaatcgaactgtaaaacgacaagtctgacataaatgaccgctatgagcactgcaattacacgccagatcgttctcgataccgaaaccaccggtatgaaccagattggtgcgcactatgaaggccacaagatcattgagattggtgccgttgaagtggtgaaccgtcgcctgacgggcaataacttccatgtttatctcaaacccgatcggctggtggatccggaagcctttggcgtacatggtattgccgatgaatttttgctcgataagcccacgtttgccgaagtagccgatgagttcatggactatattcgcggcgcggagttggtgatccataacgcagcgttcgatatcggctttatggactacgagtttagcttgcttaagcgcgatattccgaagaccaatactttctgtaaggtcaccgatagccttgcggtggcgaggaaaatgtttcccggtaagcgcaacagcctcgatgcgttatgtgctcgctacgaaatagataacagtaaacgaacgctgcacggggcattactcgatgcccagatccttgcggaagtttatctggcgatgaccggtggtcaaacgagcatggcttttgcgatggaaggagagacacaacagcaacaaggtgaagcaacaattcagcgcattgtacgtcaggcaagtaagttacgcgttgtttttgcgacagatgaagagattgcagctcatgaagcccgtctcgatctggtgcagaagaaaggcggaagttgcctctggcgagcataaatacctgtgaaaggcgctaaaaatagcgacttgggcgatttttgcagcaaacgattcaaaagatgagaaaaaccgttgacgaaggtcgaggcaatccgtaatattcgcctcgttcccaacggaacacaacgcggagcggtagttcagtcggttagaatacctgcctgtcacgcagggggtcgcgggttcgagtcccgtccgttccgccactattcactcatgaaaatgagttcagagagccgcaagatttttaattttgcggtttttttgtatttgaattccaccatttctctgttcaatgattttactctggcgtaggtgcgtgattctcgcttgttgtctcattcattaaaattcaataatgatatcgaaccattcagcttaaatatatttctagagaataaatttatattgattaaatgaatgtatatttcaaattgattttgtttgttattatttaagtgaggtatataattagagtccgttatcaatgctaaatattctaatcattatgacaggcgagggagtgtccaattatgaatagtaaaaagctttgttgcatatgtgtgttattcagcctgcttgcaggatgtgcctctgaatcttctattgatgaaaagaagaaaaaagctcaagtcacacaaagtaatattaataaaaacactccccagcaactgacagacaaagatttattcggtaatgaaaccactctggccgtatccgaagaggatattcaagctgcgcttgatggagatgagttccgcgttccccttaattctcctgtaatacttgttcaatccggcaaccgcgcaccggaaaccattatgcaggaggagatgcgaaaatattatactgtttccacattctctggtatcccggacaggcaaaagcctctgacttgtaacaaaaacaaagataaaaatgagaacgaggatgttgccagtgctgagaatatgaactggatgcaggcactgcgttttgtggctgcaaaaggacatcagaaagcgattattgtttaccaggatatgttgcagacaggaaaatatgactctgcgctgaaaagtacagtatggtccgactataaaaatgacaaactcactgacgctatctccctgcgctacctggtacgtttcacgctggtggatgtggcaacaggtgagtgggctacctggagcccggtgaattatgaatataaagtgcttccaccattgcccgacaagaatgaagccagtacgactgatatgacagagcagcaaatcatgcaacttaagcaaaagacctataaagcgatggtaaaagatttggttaaccgctatcaataataaattatatctgccgccaggaatttctggcggcaataatacaaaattctttgcataagaaatttttcttgacaaagacagtgcaagaaaggacatggaatccggagttaaaaactgtttgttttagaatatttaattatttaactgctgaatcttccttgcgagaaatatatccattattacatttcatgccatttttaatatagattgctcctgggaaaattcccgtattattaccgcaggggtgataattagtattgacatatcctgtgacaaaaggagctattaaaggtgctattacgatagctattagtaaaaatataagagttagctgtattgttatgtctgtggcgaaattgactaccttcgtttttttgattaagaatgattttattatcgtaagtaaaattacatgaatatttaaaaaggaaaacgacatgaaaccgaagcacagaatcaacattctccaatcataaaatatttccgtggagcattttattattgaatatagaggtttaactccggtaaaaaacaaagaagcattgaatgcagggaaaaataatatggccataaaaaacatcgaaagaaactcttttaatttaacatgtaaacgcatggttaatcctcatatcacgggtggagtgttaagaacatacataaatggagtcatgttttcccttttccatttatcaagttcctgttgccgttttagtccatctctaattgcatattttaatttttcacttaaatggcattgagcatcgatttcatttaaaacaactgtacacactatccctgtcagtaaaattgctcctccgacaagaattactggaaagccaaagctaacacaggcaaaagaagccagacttccaatagcggttgcaacaccaccggctataactgctttggccacatccatactaaaatcgccaagaaaattaaccagatctcgctcactactcataataaattctatggttctgctgatttaaccgcagagaagttcgccacagcaatccgaaaccactggcacgtggagaataagctgcacaggcgtctggacgtggtaatgaatgaagacgactacaaaataagaagaggaaacgcagcagaattatttagtgggatacggcacattgctattaatattttgacgaatgagaaggtattcaaggcagggttaagacgtaagatgcgaaaagcagccatggacagaaactacctggcgagtgtccttgcggggagcgggcttagctaataataccccgactctccccgtccttaaacacaacccccactcaccacaacctaaactcatccgcatcctgccatgccggaaacttttctctatattcccgcaatgctgccatgctcagctccgcatcaatgcgcgttgcctgatgcgcgtcggcagtagcgataatctctccttgcggattaatcacccggctgtcaccgcgataatggcagccgttgccatcgctgccgacgcgattgcatcccgccacatacgcctgattctcaatcgcgcgggccgtcagcaatgcctgccagtgcagagagcgcggagcaggccagttggcgacgtacagggcgaggtcataatcgttgagattgcggctccacacaggaaaacgtaagtcgtagcacaccagcggcaaaatacgccagccgcgccattccacaatcactcgcgcattgcccgctttataatgtagatgctcatctgccatgcggaacagatgacgcttatcataaaaatgtaccgtgccgcccggctcaaccagcaaaaagcggttaacgctaccagactccgtttgtaatgcaacactgcctgcaatcagcgcattgcactgctgcgccttagctgtcatccagttcactacgtcatcttgtgctaggctgctagctgccgcttccatggcaaagccgctggtaaacatctccggtagaacgatcacatcgcgcccggtaataccttccagttgacgatcaaaatgacgcaggttggcaggaccatccatccacaccagtggttgctgcaaaagcgtaatcttcaaaccaggcacggtgtacaactcctttatgcgaagggttttataactttaacaccttatcaggcagttgccttagcgcagaataaattgataacaaatgctgatattggaaatatctgatttgcaaattatcgtgttatcgccaggctttaggaggttaataacatgggcaggataagcagcggaggaatgatgtttaaggcaataacgacagtcgccgctctggtcatcgccaccagtgcaatggcgcaggatgatttaaccattagcagccttgcaaagggcgaaaccaccaaagctgcatttaatcagatggtacaagggcataagctgcctgcctgggtgatgaaaggcggtacttatactcccgcacaaaccgtaacgttgggagatgagacgtatcaggtgatgagcgcgtgcaaaccgcatgactgtggcagccaacgtatcgctgtgatgtggtccgagaaatctaatcagatgacggggctgttcagcactattgatgagaaaacgagccaagagaaactcacctggctgaatgtgaacgatgcgcttagcattgatggtaaaacggtgttgttcgcggcgttgaccggcagcctggaaaaccatccggatggctttaattttaaataattagcggataaagaaacggagcctttcggctccgttattcatttacgcggcttcaactttccgcactttctccggcaactttaccggcttcgtcgccagctcttccggatcaaagtcatcaacgttaatactgcgcagacggctttcttcagctttcaccagaatagcggcttcatctttatcaatcagccccttcaccagcgcgttgtgcgccagttcatccagacgggtaaacggcaggtttttacccagctctttacagatccgctgatgaattgggtcggcggcaatcacatccaccagcgcctcttccagcaagccaaccggattatgctcgctcggcgtcaggtactgaccgcgaccaatgcgggaacgggtggcgttcggcacttgtaaaatcttcgccactttatgatccagcttgtcagaaggtgccagataatgacgtccggtcgggaagatcaccacattcagcagcccggcaaccacgcggttcgggaagttttgcagtaaatcatccatcgcctgttcagcctgatacagcgcatcttgtacgccccagtgcaccagcggcaggtcggcttcattacggccttcgtcgtcataacgcttcagcacggcagaggcgaggtagagctggcttaaaatatcccccagacgggcgctgatgcgctcgcgacgtttcaggctgccgcccagcactgccatgctgacatcagaaagcagggcgaggttggcgctcaggcggttcaggtgctgatagtagcgtttagtggcatcgccggttggcgtgctgctggttaaaccgcgcgtcaggcccagccagaagctgcgaactttgttgctaccgacgtgaccgatatgtttgaacaacagtttatcgaacgcgttgacgtcattgttcttcgccgcttccatctcttccagcacgtacggatggcaacgaatcgctccttgtccgaagatcatcatgctgcgggtcagaatgttagccccttcaacggtgatggcaatcggtgcgccctggtaagcacgcgccaggaagttgctttgcccgagcataatgcctttaccgccggtaatatccatcgcatcaataatgttctgctgcccgcggtgggtacagtgatacttaacgatagcgctcagcacggcaggtttttcgccgagcataatgccgtaggtaatcaggcttgccgcagcatccatcacgtaggcattaccggcaatacgcgccagcggctcttcaatcccttccatcttaccaatagagattttgaactgacggcgaatgtgagcatacgcgccggttgccagcgctacgcttttcacgccgccggtactgttggaaggcagggtgatgccgcggcctacgctgaggcactccaccagcatccgccagccttgcccggccattttcggcccgccgatgatgtaatcgatcggcacgaagacatctttaccgcgcgtcggtccgttctggaacggtacgttcagcgggaagtggcgacgaccaatttccacgcccggcgtggtggttgggatcagcgcacaggtaatgcctaaatcttctgcaccgccgagtaatttttccgggtcggagagtttaaacgccagcccaagcacggtcgcaatcggtgccagcgtaatgtagcgtttgttccaggtcagacgcatccccagcacctgctggccctgccattcgcccatgcagacaatcccggtgtccggaatcgcgcccgcatcggaacccgcttccgggctggtcagtgcaaagcaggggatctcctgaccacgcgccagacgcggcagatagtgatctttctgctcgtcagtgccgtaatgttgcaacagttcgcccgggcctaaactgtttggcacgccgacggtaatcgccaggatcccgctcacgccggagagtttttgcagcacgcgagactgggcataagcgctgaactccagcccgccgtactcttttttgatgatcatcgcgaagaaacgatgctctttaaggtacgcccacaactccggcggcagatccgccagctcatgggtgatctggaaatcattcgccatccggcaggcttcttctaccgggccgtcgagaaacgcttgctcttcggcggtcaggcgcggctgcggatagttatgcagctttttccagtccggcttgccctggaacaagtcgccctcccaccaggtggtgcccgcatcaatcgcttctttctcagtgcggctcatcggcggcatcaccttacggaaaccgcgaaataccggcgcggaaatcatgctcttacgcataggcgcaaagttaaatggcacgaggataatggccagaggcaccagtacccacgcgctccacagaccagcaacgccgagggcggctgtccaggcgagcaaaatcagactgctgataaataagctcacgcggtgatagaacaacgcgccgagcaggacaaccgtagcgagaatactcaaaatcatcataacgaaaagccccttacttgtaggaggtctgaccacttgtgatgatatggttgtagtggatgtaaaaacatttagcaatatgtttacaatataattacaacaaagctcacattgttgctgtttttatccgcacttcaggtcaaaaagtcctggtcatagcacctgcccgtacttctcgcttttggcggtatccggtacactgcattttgtctattacatttatgctgaaggatatcctcatgtaccaggatcttattcgtaacgaactgaacgaagcggcggaaacgctggctaactttttaaaagatgacgccaatattcacgccattcagcgcgcggcggtcctgttagcagacagctttaaagccggtggcaaagtgctttcctgcggcaacggcggttcccattgcgacgctatgcactttgccgaagagttgaccggtcgctaccgtgaaaaccgtccgggctacccggcgattgctatttctgacgttagtcatatttcctgcgtcggtaatgatttcggtttcaatgatattttctcccgctacgttgaagcggtaggtcgcgaaggcgatgtactgctggggatctccacctccggtaactctgcaaacgtgatcaaagcgatcgcagcggcgcgtgagaagggaatgaaagtgatcaccctgaccggtaaagacggcggcaaaatggctggcacggcggatatcgaaattcgcgtaccgcactttggttatgccgaccgcattcaggagattcacattaaagtgatccatatcctgatccagttgattgaaaaagagatggttaagtaagtctggcgtaggccggataagacgtttacgccgcatccggcatttgtgcgctgatgcctgatgcgacgctgacgcgtcttatcatgcctacaaatctgtacgcgaaccgtaggccgaataatgcgttcacgccgcatccgacctgaaaattcttaaatcaatcttcgccgggggccatgcgctcccgctgttgtggaggttacccatgtgcgaattgctcgggatgagcgccaacgtccctaccgatatctgctttagtttcaccgggcttgtacagcgtggtggtggaaccgggccacataaagatggctggggcattaccttttacgaaggtaaaggctgtcgcacatttaaagatccacaacccagctttaattcccccatcgccaaacttgtccaggactacccgataaaatcctgtagcgtggtggctcatattcgccaggctaatcggggcgaggtggcgctggaaaatactcacccatttacccgcgagttatgggggcgtaactggacttatgcccataacggacaactgacgggctacaaaagtctggaaaccggcaacttccgcccggtaggcgaaaccgacagcgaaaaagccttctgctggctcctgcataaattaacgcagcgttacccgcgcacaccgggcaacatggcggcggtatttaaatatatcgccagtctggcggatgaactgcggcagaagggcgttttcaacatgctgcttagcgacgggcgctatgtaatggcgtattgcagcactaatttacactggatcacccgccgcgcgccgtttggcgtggcaacgttgctggatcaggatgtggaaatcgacttcagcagccagaccacaccgaatgatgtggtcacggtgattgcaacacagccgctgacgggcaatgaaacctggcaaaagattatgccaggcgaatggcgcttattttgcctcggggagcgtgtagtttgattattttgcctcggggagcgtgtagttacttgccagttgtggctgcacaacttcgtggcttaacggcttgctgaccacgtaacgaccattgaccacagaaacggttggtggcttacgggtttgctcaaagtagtcgtaacccggcttcagttgctcccagaagtccttaaagttggaatatttatggcgcttcatattggcgtcggtcatgcggaacgggtaaatactcacttgcacgctcggctgaccaaacaccagcgcaccagtaacgaactggaatatctcatcaataccctgattggtcattgcgtagcagccgatggaaacacaatcgccgtggatcatcaggtatttcccttcataaccatgcgcacggtcataggcattggggaaaccaatattaatcgctttgtagtaacggctgtctggttttaactgattacgctggacgctataaaacccttccgggcttttgaaatcgccctgacgctgttttggccctaagccgccggaatatttacagattttatagctgtcgagcagttgatattgctcgcccattttgacgtagagatcgagcgtacgttcttccttgaagatctggatgtagacaggggatcccatcaactgctgcttatactctttgctcacaggcgtggtagagctactgctgcccagcaaaccggcaaaactaacgcacgggatcaacaacatcgcaagaattaatgcgattttacgcatactgcttattccttgataaaacggttacacacgccaggacggcaaaatggatcccaaatcggaatagtctggatttggaaggctcacattatcaccaaaagagttttacgcaagcctgtcggcgcagggtttacaaatttcatcggaagcgggctttacccaaagagcgccgcgtgagttccagttctctcaaatcgtaaaagtttatcggtaagtttgtaaatcaggatccagtccggttcgacatgagcatcgcgataacctttccaactaccttgcagcgggtggtctttataaacagctggaagcggtaaagtattattgataagaagcgtcataagatatttcaatttattcatatccttatgacgcttttgtgcaagttttacatccttactatattgtccgctgtattcaatatccctttgaatcatatttaaattcctaatttatcaaataaatcatcggcgtctttggccttatgaacatcaatgccagcttcgctgtttttgatactttgaatggttaattgattaggctcgcgtaaatcaaacggcaatgccttttcacgcgcgacctttgtgagggttatgcgaaccaggtcagagatggtcagccccatcccggccagtacgtccgctgcctgattcttcagatcttcatcgattcgggcgcgaacaaacgcgttagcagccattggggtatctcctgtgctgtatatttattcagcttgaattgtagctcaaatgagcaacagcgacaatccatgagtaatttaataaacggatgtttttacataattaactgaaatatatatgttaattttataataatggtttattaagtttgttcagaaacgatccgggatacactgcaacattaaagcatgaccagccattattgagtatgtccttgccgagcattccatcctttgtattgagcggattactgttgatttgtttgccgttttctagttttgccagcgccaccacaagtcatatctctttcagctacgccgcccgccagcggatgcaaaaccgtgcgcgtttattaaaacagtaccaaactcatctgaaaaagcaggccagctatattgtggaaggcaatgccgaaagcaaaagggcgctacgccagcacaaccgggagcagataaaacagcatccagaatggtttcctgctccgctcaaggcgagtgacagacgctggcaggcgctggcggaaaacaaccactttttaagcagcgaccatctgcataacattaccgaagtggcgattcaccgcctggagcagcagcttggcaagccttacgtctggggcggtacgcggcctgataaaggctttgactgtagcgggttggttttttatgcctacaacaagatccttgaggctaagctcccgcgcacggccaatgagatgtaccactatcgccgggcaacgattgtggcgaacaacgacctgcgccggggagatttgctgtttttccatatccacagccgcgagatagccgatcatatgggcgtgtatttgggcgatgggcaatttatcgagagcccacgtaccggcgaaaccattcggataagccgattagccgaacctttctggcaggaccattttttgggcgcgcgcaggattttgacggaagagacgattttgtaagacggataaggcgtttacgccgcatccggcagttgtacgcaggtgcctgatgcgacgctggcgcgtcttatcatgcctacgagcccgcgaatatttgcgagccgctttcccgatataaaacaacctcattgccaacctttccttttcttcttaccgttgagaaaaaggagtcgccatgtctgaatatcgtcgttattacatcaaggggggaacatggtttttcacggtgaatttacgaaatcgtcgaagccaacttttgaccacccagtaccagatgctccgtcacgccattattaaagttaagcgagacaggccttttgaaatcaacgcctgggtcgttttgccagagcatatgcactgtatctggacattacctgaaggcgatgatgatttttccagccgctggcgggaaattaaaaagcaatttacccatgcttgtggattgaaaaatatctggcaaccacgtttttgggagcacgccatccgcaataccaaagattataggcatcatgttgattatatttatataaatccagtaaagcatggttgggtaaagcaagtgagtgattggccattcagtacgttccatcgcgatgtcgcgcgagggttatatcccatcgattgggcgggggacgtaacggattttagtgccggggagcgtatcattagttaattgtgcgcagatgcctgatgcgacgctagcgcgtcttatcatgcctacaaacttgtgccggatcggtaggccggataaggcgtttatgccgcatccggcagttatgcgcagatgcctgatgcgacgctggcgcgtcttatcatgcctacaaacttgtgcctgaacggtaggacggataaggcgttcacgccgcatccggcagttgtgcaccaatgctggatacttacatcaacgcccccataatcttcaactccagctcatccggcacttcgttatacgacagcacatgcagccccggcgcaaacaaccttgcataacgcgccagcaaagggcgcagctgcggtggcaccagcagcaccgggtctttccccgccgctttcatctgctctttcacctgtggcatcgtactctggaactggttgagcatattcggatcgaccggcacgctgtcgagcatcactttcccgccctgttgcgcctgattcaccacgttggtcagcagattttccagctcattattcagcgtatacaccgtcagctcctgcttgcgaacgaacggatgggtaatgctgcgccgcaatgccaggcgcacatcggccgccagcagaatatgatctttcgtcaccgtgctactggcgaccagcacggtggcgatggtgacgatatcgcgcagggaaacgccttcggtcagcagcgcccggtacactttcagcaactggctgtaattgagcgccgcgctcaaatcttccgccagacgcggtgccgtcgacgataaacggttatgcaactgcgtaatatcatcatagttaaacaaatcaggaatatagctgcgcacaatcttatttacatgggtagcgatcacgctggcgctgtcgatcacctgataccccatattcagcgccttcgctttctgcgccgcctggatccaggtgaccggcatcccgtacgccgggtcgttcccctgcacgccgtcaatctcgccgtaggtttcgctggagggcagggccatcagtttatccgccggaatatccgcttcatcagcctttatgccgttgatgaaaatggcgtactgactgggcttaaggcggaagttttcccgaatgcggatctccggcagcagcacgccgttgccgtcagaaatcacctgccgcacgccgcgaatccgctgggtgagcgggttaccctgtgctttgtccaccagcgccaccagtttgtaaccgaggcttaaactgataggctcgatcagcggaatggtttcccaactgacctgctgctcgctggtttcggtgatggtgcgggtcagcgtttcgaggcttttctcttccgcctccgccgccagcggctgtttgctcatccgccagccggtaaaaccaagcagggcgctgaacagcaaaaacggcaggtgcggcattcccggtaccaccgccagcacgaacataatcccggtggcggtgtagagcaccgacgggcttgccagcagctggttacgcacgtcatgggcgatatcgccgttgtcgctgacgcgggtgacgataatcgccgccgcggtggagagcagcagggaagggatctgcgccaccaggccgtcgccgatggtcatcagcacatactgctggaaggcagcatcggcgctcaggttgtatttgaagatcccgatacagacgccgccgatcaggttgatcgccagaatcatcatcccggcgatggcgtccccgcgcacaaacttcgatgccccgtccatcgcgccgtagaaatcggcctcgctggcaacatctttacgccgggtttgcgcctgcgcctggttgatcaatccggcgttaagatcggcgtcaatcgccatctgtttgccgggcatcgcgtctaaggtaaagcgggcagaaacctcggaaatacgctcggcccctttggtgacgacaataaagttgattgtcaacagcgtcagtaaatccgagcgtgaaagcattatcgccgcgctgcacgggcagtcgatttttaacggtggtgggctgtcgccgttaaataaaatcagcccgtctcatccgccaaaacctgccaccgtggcggtgccggaagagacggagaaaaaagcgcgtgatgtgaatgagaaaacggcgctgctgaagaagaaatccgccaccgagcttggtgagctggcaaccagtatcaacaccattgcccgtgatgcgcatatggaagcgaatctggagatggagattgttccccagggattacgcgtgctgattaaagacgaccagaaccgcgatatgtttgaacgcggcagcgcgaagattatgccgttctttaaaacgctgctggtggagctcgcgccagtgttcgactcgctcgataataaaattattattaccgggcataccgatgcgatggcctacaaaaacaatatctacaacaactggaacctttcgggtgaccgcgcgctttcggctcgtcgggtgctggaagaggccggaatgccggaagataaagtgatgcaggtaagcgcaatggcggaccagatgctgctggattccaaaaatccgcaaagcgcgggcaaccggcgcattgagattatggtgctgaccaaaagtgcgtccgatacgctgtatcaatactttggtcagcatggggataaagtggtgcagccgctggtgcaaaagctggataagcagcaggtgctttcgcagcgaacgcgttaaatgctgaatctttacgcatttctcaaaccctgaaatcactgtatactttaccagtgttgagaggtgagcaatgcgtaaaatcattcatgtggatatggactgctttttcgccgcagtggagatgcgcgacaatcccgccctgcgcgatatccctattgctattggcggcagccgcgaacgtcgggggggtgatcagcaccgccaattatcccgcgcgtaaatttggcgtacgtagcgctatgccgacagggatggcgctcaaattatgcccacatctcaccttgcttccggggcgctttgacgcctacaaagaagccagtaatcatatccgtgaaatcttcagccgctacaccagccgcattgaaccgttgagtctggatgaggcttatctcgatgtcaccgatagcgtccattgccacggttctgcgaccctcatcgcccaggaaatccgccagacaatcttcaacgagctgcaactgacggcgtctgcgggcgtggcaccagtaaagtttctcgccaaaatcgcctccgacatgaataaacccaacggccagtttgtgattacgccggcagaagttccggcatttttacaaaccttaccgctggcaaaaatccccggcgtcggcaaagtcagtgcggcaaaactggaagcgatggggctgcggacctgcggtgatgtacaaaagtgtgatctggtgatgctgcttaaacgctttggcaaatttggccgcattttgtgggagcgtagtcaggggattgacgaacgcgatgttaacagcgaacggttgcgaaaatccgtcggcgtggaacgcacgatggcggaagatattcatcactggtctgaatgtgaagcgattatcgagcggctgtatccggaacttgaacgccgtctggcaaaggtaaaacctgatttactgattgctcgccagggggtgaaattaaagttcgacgattttcagcaaaccacccaggagcacgtctggccgcggctgaataaagctgatctaatcgccaccgcgcgtaaaacctgggatgaacgccgcggcgggcgcggtgtgcgtctggtggggctgcatgtgacgttgcttgacccgcaaatggaaagacaactggtgctgggattatgatgtatactattatgtatattctggtgtgcattattatgagggtatcactgtatgcatcgaattctcgctgaaaaaagcgtcaatatcactgagttacgtaaaaacccagctaaatactttattgatcaaccggttgcggttctttctaataatcgccccgcaggatatctcttaagtgccagcgcattcgaagcgttaatggacatgcttgctgaacaagaggagaaaaagcccataaaggcgcgcttccgtccaagtgctgcaagattagaggaaattacacgccgcgctgaacaatatcttaatgatatgacggatgatgatttcaatgactttaaggaataaggatgcgggtattcaaaacaaaacttattcgcctgcaacttacagcagaggaacttgatgcgttaacggcggattttatttcctataagcgtgacggtgttttgccagatatatttggtcgcgatgcactctacgacgactcctttacctggccattaatcaaatttgagcgagttgctcatattcatctggcaaatgagaataatccatttccgccacagttgcgccaattcagcagaacgaatgacgaagcgcatttggtatattgtcagggggcgtttgatgagcaagcatggttgctcattgccattctgaaacctgaacctcataaactggctcgagataacaaccaaatgcataaaattgggaaaatggcagaagcgtttcgcatgcgtttttgaatttatattatgaataacatacaaataagaaactatcagcctggcgattttcagcaactatgcgctattttcattagagcggttacgatgaccgccagtcagcattatagtccacaacaaatttccgcctgggcgcagattgacgaatctcgctggaaggagaaactcgcgaaaagtcaagtgtgggttgcgatcattaatgcacaaccggttggttttatttcccgcattgaacattatatcgatatgttatttgttgaccctgaatacacccgccgtggggttgccagcgctttgttaaaacctttgattaagtctgaatccgaacttacggtggacgcaagcataaccgcaaaacccttttttgaacgttatggttttcagacagttaagcagcagcgcgttgaatgccggggagcgtggtttactaatttttatatgcgatataaaccgcaacattaaatccagcttgcaatgaaaataacgcccgcctggtatgtgcgcgttttctgattccacaaactgcaaggaggtaaatcatgacaaatcctttatcaatgactctttgcagacctttccaggattaattctttttttcttgccctggattcgtctgccatttcctgatttttatatttatatactctaaataattcgagttgcaggaaggcgacaagcgagtgaatcgccaggagcttacataagtaagtgactggggtgaacgaacgcagtcgcagtacatgcaacttgaagtatgacgagtataaatggaatggtacatgggcaaatatattcgtcccttatccgatgcggtatttaccatcgcatctgatgacctgtggatcgagagtttagcgatccaacaattacacaccacggcaaatttacccaacatgcagcgcgtagtggggatgccagatttacaccccggacgcggctacccgattggcgcagcgttcttctctgttggtcgtttttacccggcaagacgtcgcggtaacggtgctggaaacagaaacgggccgctactctgacacactgcgtagcgcgctggtttctctcgatggcgataacgcatgggcattaagcgaaagctggtgtggcactattcagtggatttgtccgagtccgtatcggcctcatcatgggcgcaaaaactggtttctgggcattgggcgttttaccgctgatgagcaggaacaaagcgatgcaatccgttatgagacgctgcgtagcagcgggccgggcggtcaacatgtcaataaaaccgacagcgcggtacgcgccacgcatttggcatccggtattagcgtgaaggttcagagtgagcgtagtcagcatgctaacaagcggctggcacgattgctgattgcctggaagctggagcaacagcaacaggaaaatagcgcggcgctgaaaagccagcggcgaatgttccatcaccagattgaacgtggcaacccgcgacggacatttacagggatggcttttatcgaaggataatgaaggatgaaactgccggaaggcgattaaacgccatccggcagcaaatcaaataattacttcgccggaatttctttcagcagttcagtcagcagtgtccagtaatgacctacgctttcgatgtgaacttgctcatccggagagtgtggaccggtgatagttggcccgatagaaaccatgtccatttccggatacggttttttgaacagaccacattccaggcccgcgtggataatctggatgttcggcgtcttgttgaacaggcgctgataggtttcacgtaccagatgcatcaccggagaattagcgtccggctgccagccaggatatgcgcctttcgcttcggttttcgcgccagccagtttacccaggctatccagcatgctcaccacgtagtctttaccgctgtcgatcagactacggatcaggcagtgaatttctacgttattgtcagtcatggtcaccacaccgacgttcagggaggtttcaaccacacctttggctacatcggagttacgaatcacaccgttcggggtggcgttcagcagacgaataaaggtatcgcgagatttcgcaatcagggcagctttatcgttcgctacagagtccagcaacaaggccagatttttctctttttctgccagctcgtttttcaggatctcctgataggtattcaccagagatttcaggacgtcgactttatcagctgcgacagcaatggtcgcaaaggcttcacgcgggatggcgttacgcagtgtgccgccgttgaaatcgataaggcgcagatccagttcttccgcatgacccgccaggaagcgcaccagcagtttgttggcattacccagcccaacgtggatttccccgccggagtgaccgcctttcagaccttttaaggttaacttgaaggtttcaaaaccagctggaaccgcttcacgatctaaatgcaggttggaggtgaagtcgataccccccgcacaacccatgtagatttcaccttcttcttcggagtcggtgttaatcagaatatcagcctgcaaccagttgccctgtaagccgaacgcaccgtccataccggcttcttcggtcatggtcagcagcacttccagcgggccgtgaaccacgttttcgtcagccagaaccgccagcgcagaggccataccaatgccgttatccgcacccagcgtggtgccgcgcgctttaacccattcgccatcaatataaggctggataggatctttcgtgaagtcatgcacggtgtcgttatttttctgcggcaccatatcgaggtgggcctgtaagacgaccggtttacgattttccatacctgcggtagcaggtttacgaatcaggatattacctacctgatcgcgttcgacatggaaacctttctcttttgcccaaccaacaatgtattcagcgagttgctcttcatgataggacgggtgaggaatagaacagattttggcaaaaatatcccacagcggctgtggagataattgagacagttcagacacgttaagtctccttgtcgatcacccgcaaaacagtattgcaggtcacagggttagcagaaaatgttgtcaacacaagacaggcttgcgagatatgtttgagaataccactttatcccgcgtcagggagaggcagtgcgtaaaaagacgcggactcatgtgaaatactggtttttagtgcgccagatctctataatctcgcgcaacctattttcccctcgaacactttttaagccgtagataaacaggctgggacacttcacatgagcgaaaaatacatcgtcacctgggacatgttgcagatccatgcacgtaaactcgcaagccgactgatgccttctgaacaatggaaaggcattattgccgtaagccgtggcggtctggtaccgggtgcgttactggcgcgtgaactgggtattcgtcatgtcgataccgtttgtatttccagctacgatcacgacaaccagcgcgagcttaaagtgctgaaacgcgcagaaggcgatggcgaaggcttcatcgttattgatgacctggtggataccggtggtactgcggttgcgattcgtgaaatgtatccaaaagcgcactttgtcaccatcttcgcaaaaccggctggtcgtccgctggttgatgactatgttgttgatatcccgcaagatacctggattgaacagccgtgggatatgggcgtcgtattcgtcccgccaatctccggtcgctaatcttttcaacgcctggcactgccgggcgttgttctttttaacttcaggcgggttacaatagtttccagtaagtattctggaggctgcatccatgacacaggcaaacctgagcgaaaccctgttcaaaccccgctttaaacatcctgaaaccagcacgctagtccgccgctttaatcacggcgcacaaccgcctgtgcagagcgcccttgatggtaaaaccatccctcactggtatcgcatgattaaccgtctgatgtggatctggcgcggcattgacccacgcgaaatcctcgacgtccaggcacgtattgtgatgagcgatgccgaacgtaccgacgatgatttatacgatacggtgattggctaccgtggcggcaactggatttatgagtgggccacccaggcgatggtgtggcaacaaaaagcctgtgcggaagacgatccgcaactcagtggtcgtcactggctgcatgcggctacgttgtacaacattgccgcctatcctcatctgaaaggagatgacctggccgagcaagcgcaggctttgagtaaccgcgcctatgaagaggccgctcagcgtctaccgggcacgatgcggcagatggagtttaccgtacccggcggtgcgcccatcaccggctttttgcatatgccgaaaggcgatggcccgttcccgacggtattaatgtgtggtggtctggatgcgatgcagacggactattacagcctgtatgaacgttattttgcgccgcgcggcattgcgatgctgactattgatatgccgagcgtgggcttttctagtaaatggaagctcacccaggactccagcctgttgcatcagcacgtcttaaaggcgctgcctaacgtaccgtgggtggatcacactcgcgtcgcggcctttggtttccgtttcggcgctaacgttgccgtgcgtctggcataccttgaaagcccgcgtctgaaagcggttgcctgtcttggtccggtagttcataccctgttgagtgattttaagtgccagcaacaggtgccggaaatgtatcttgacgttctggccagtcgtttggggatgcatgatgcttccgatgaagcgttgcgcgtggagctgaatcgctatagtttaaaagtgcaaggattgctgggacgtcgctgcccaacgccaatgttaagtggctactggaagaacgatccgttcagcccggaagaggacagtcgcttaatcaccagtagttctgctgacggtaaattattagagatcccatttaacccggtgtatcggaattttgacaaaggtcttcaggaaatcaccgactggatcgaaaaacgcttgtgttaaaaatttgctaaattttgccaatctggtaaaacagttgcatcacaacaggagatagcaatgacgttaccgagtggacacccgaagagcagattgatcaaaaaatttaccgcactaggcccgtatattcgtgaaggtaagtgcaaagataatcgattctttttcgattgtctggctgtatgcgtcaacgtgaaaccggcaccggaagtgcgtgaattctggggctggtggatggagctggaagcgcaggaatcccgttttacctacagttaccagtttggtctgttcgataaagcaggcgactggaagagtgttccggtaaaagacactgaagtggttgaacgactggagcacaccctgcgtgagtttcacgagaagctgcgtgaactgctgacgacgctgaatctgaagctggaaccggcggatgattttcgtgacgagccggtgaagttaacggcgtgagtgaaatgtgccggatgcatcacatccggcaatattcattaaaactgatacgtcatgccaaccgcgacaatatcatcattattaatattcaatttgttatcgctatccagttggttgattttataatcaacaaacgcactcatatttttgttgaaataatacgtagcaccgacgtcgatataattgaccagatcttcatcaccgataccttcaatatctttccctttgcttaagacataacccaggcttggacgcagaccaaagtcaaactggtattgagcgaccgcttcaaagttctgtgtcttattggcaaagccgccagttattggcgtcattttgcgtgtttcagaatagaaagttgccagataaatattattggcatcgtatttcagacctgttgcccatgcttctgcacgcttgcctgtgccacggctttgcaggttctgctcgttggtgcgatcactgttggtataggccccactaatggcgaaatcgctgccgccaaagtcatatgtcaaactcgtgccgaagccatcgccgttttgctttttaacgtcgcggttttcgtttttcccttgatattgcagggttaagttcaggccatcgataacgccgaagaagtcggtgttccgatacgtcgccagaccgctggcgcgtttggtcataaagttgtcggtctgcgcgctggaatcgccaccaaattccgggaacatatcggtccaggcttccacgtcatacaacgcccccaggttacgaccataatcgaaagaacccaaatctttatatttcaacccggcaaaagcgagacgcgttttttgctgtgcagtatcactctctgctttattaccggcaaactctgcttcccaacgaccataaccagtcagttgatcgttaatttgtgtttcgcctttgaaaccaaaacggatataactctggtcgccatctttactggcgttatcactcatataatgcatggctttaactttgccatagacatccagtttattaccgtctttattatatatttctgcagcctgtacagatgcagatgccacaatgcccatcaccactaatgccagagtgctctttttcattttcattcctgattttaattaacgcgcgaatattcagcgggagagtcccgttgaaaacaggaaagtttttaacctgagattgttaaagatatattacagattaataatattcttaaaatgtggtaatttattaaatctgtaataaaagcgtaaacaactgccgctaggcttgctgatcccgcgcaacaaaacgccatgctttgctcgcagatggttggcaaccgacgacagtcctgctaaaacgttcgtttgatatcatttttcctaaaattgaatggcagagaatcatgagtgacagccagacgctggtggtaaaactcggcaccagtgtgctaacaggcggaagccgccgtctgaaccgtgcccatatcgttgaacttgttcgccagtgcgcgcagttacatgccgccgggcatcggattgttattgtgacgagcggcgcgatcgccgccggacgtgagcacctgggttacccggaactgccagcgaccatcgccagcaaacaactgctggcggcggtagggcagagtcgactgattcaactgtgggaacagctgtttagcatttatggcattcacgtcgggcaaatgctgctgacccgtgctgatatggaagaccgtgaacgcttcctgaacgcccgcgacaccctgcgagcgttgctcgataacaatatcgttccggtaatcaatgagaacgatgctgtcgctacggcagagattaaggtcggcgataacgataacctttctgcgctggcggcgattcttgcgggtgccgataaactgttgctgctgaccgatcaaaaaggtttgtataccgctgacccgcgcagcaatccgcaggcagaactgattaaagatgtttacggcattgatgacgcactgcgcgcgattgccggtgacagcgttagtggcctcggaactggcggcatgagtaccaaattgcaggccgctgacgtggcttgccgtgcgggtatcgacaccattattgccgcgggcagcaagccgggcgttattggtgatgtgatggaaggcatttccgtcggtacgctgttccatgcccaggcgactccgcttgaaaaccgtaaacgctggattttcggtgcgccgccggcgggtgaaatcacggtagatgaaggggcaactgccgccattctggaacgcggcagctccctgttgccgaaaggcattaaaagcgtgactggcaatttcagccgtggtgaagtcatccgcatttgcaacctcgaaggccgcgatatcgcccacggcgtcagtcgttacaacagcgatgcattacgccgtattgccggacaccacagccaagaaattgatgcaatactgggatatgaatacggcccggttgccgttcaccgtgatgacatgattacccgttaaggagcaggctgatgctggaacaaatgggcattgccgcgaagcaagccagctataaattagcgcaactctccagccgcgaaaaaaatcgcgtgctggaaaaaatcgccgatgaactggaagcacaaagcgaaatcatcctcaacgctaacgcccaggatgttgctgacgcgcgagccaatggccttagcgaagcgatgcttgaccgtctggcactgacgcccgcacggctgaaaggcattgccgacgatgtacgtcaggtgtgcaacctcgccgatccggtggggcaggtaatcgatggcggcgtactggacagcggcctgcgtcttgagcgtcgtcgcgtaccgctgggggttattggcgtgatttatgaagcgcgcccgaacgtgacggttgatgtcgctagcctgtgcctgaaaaccggtaatgcggtgatcctgcgcggtggcaaagaaacgtgtcgcactaacgctgcaacggtggcggtgattcaggacgccctgaaatcctgcggcttaccggcgggtgccgtgcaggcgattgataatcctgaccgtgcgctggtcagtgaaatgctgcgtatggataaatacatcgacatgctgatcccgcgtggtggcgctggtttgcataaactgtgccgtgaacagagcacaatcccggtgatcacaggtggtataggcgtatgccatatttacgttgatgaaagtgtagagatcgctgaagcattaaaagtgatcgtcaacgcgaaaactcagcgtccgagcacatgtaatacggttgaaacgttgctggtgaataaaaacatcgccgatagcttcctgcccgcattaagcaaacaaatggcggaaagcggcgtgacattacacgcagatgcagctgcactggcgcagttgcaggcaggccctgcgaaggtggttgctgttaaagccgaagagtatgacgatgagtttctgagtttagatttgaacgtcaaaatcgtcagcgatcttgacgatgccatcgcccatattcgtgaacacggcacacaacactccgatgcgatcctgacccgcgatatgcgcaacgcccagcgttttgttaatgaagtggatagctccgctgtttacgttaacgcctctacgcgttttaccgacggcggccagtttggtctgggtgcggaagtggcggtaagcacacaaaaactccacgcgcgtggcccaatggggctggaagcactgaccacttacaagtggatcggcattggtgattacaccattcgtgcgtaaataaaaccgggtgatgcaaaagtagccatttgattcacaaggccattgacgcatcgcccggttagttttaaccttgtccaccgtgattcacgttcgtgaacatgtcctttcagggccgatatagctcagttggtagagcagcgcattcgtaatgcgaaggtcgtaggttcgactcctattatcggcaccattaaaatcaaattgttacgtaagatcttatcattctcccaccaaaaaattatcttaatgtaacagctggtgtaagtaaattctatcaacgaagatcaatcttatctactgaccaaaaaggcctgatagggcttcgctcactatacatccttggctgcaggtttagttgtacaccactcctaaatttaatgtgttggcaatgtgttcaataaagctcgaacaaattagctcattatgatcggttaatacttcaacttctggttgcatgattgtttgtccgtaaaaagataacgcgcctgccgggtagtagcaggcgcattacgcaataggtaaacaagggaggaagttcagaaatgtaaatcgggaaggttgtacgcaatgttcatcgtactacgttgttacggctttgccgcaacaagccagttgcctgccgcgctcgcagaatgtctgcagcccggagataaggagattgttcctgccagctaaatcccttcctgtcgatacgaaccagctcgtatttttctaccagaaaattcacggcatcggctagggtgataccggcatcgatagtctgtatcaggaatgttcgggttaaatatcagcaaaaagcccgcatcatgaatactggatatgaagcatgagagttacctcagtgtttatataaggattcggtccccctctctggaacggtaactctcaatctgatcggttcctgcgttagttcacatcacgactcattttttcgctctcaccggcatcccatttgccacaaaatatcccgccgtgctcctcggcagcgcttcctgtccacgaatcatatccgctattttctcgccaatcataattgtcgtggcgttcaaattcccggtgataatctgcggcataatgctcgcatccaccacacgcaggccttctaacccgtgtacgcggccttcgccgtcaaccacggacatctcgtcgtaacccattttgcaggtaccgcacggatggaaggcggtttcggcgtggttacgcacgaactcatcgagctgttcatccgtctggcattcgacaccggggctgatttcgcggccacgatactgatccagcgcgggttgatgcatgatctcgcgggtgatgcgaattgcgtcgcggaactcctgccagtcctgctcgtggctcatgtagttaaacagaatcgccggatgctggtgcgggtcgcgggatttaatccgcacatgcccacggcttgggctgcgcatactgccgacgtggcactggaaaccgtgctctttcactgcattgctgccgttatagttaatcgctactggcaggaaatggtactgaatattcggccacgcaaattcctcacggctgcgaataaatccacctgcttcaaagtggttgctggcaccaacgccagtgccgccaaacagccactccgcaccgattttcggctggttccaccactgcagggcagggtagagggaaaccggttctttgcactcatattgcagatacatctccagatgatcctgaagattttcgccgacgccgggtaattcatgcaccagcggaatatcaaactccgccagcagttcagcgttgccgacgccggagcgttgcaggatctgcggactggcaatcgcgcctgcacataacagcacttctttgttggccgttgcgcgggttgggatggtgctgtcgccttccagccattcgacgcccaccgcgcgtttgccgtcaaaaatgatgtgatcggtcatagcgtgagtacgaatggtcaggttaggacggcttttggcctgatcgagatagccacgcgcggtgctggcgcgacggccctgcggcgtgacggtgcgatccatcggaccaaaaccttcctgctgataaccgttgagatcgtccgtgcgcgggtagcccgcctgcacgcccgcttcaatcatcgcttcaaacagcggattgacgccgggtttggaggtagtgacgctcaccgggccatcaccgccgtgatagtcgttttcacccatatcgcgagtctcggccttgcggtagtagggcaggcagtcgaggtagctccagttctccagaccgggttcttgcgcccagttatcgagatccagcgcattgccacggatgtagcacatgccgttgatcaggctgcttccacccagacctttaccgcgtccgcactccatgcggcggttattcataaacggttcaggttccgtttcataggcccagttgtagcgtttaccctgtagcgggaatgccagggcagcgggcatctgggtgcggaagtcaaagcgatagtccgggccgcccgcttcaagcagcagcacggaggtattcggatcttcagtcagacgggtagcgagaacgttgccggcactgccggcaccaataatgatgtagtcaaattgcaaataaacctcctggttagaatatggactggaatttagccatctcaacctggatggacttcacctgggtgtaactctggagcgtcatcacgccgttctcgcgaccaatgccggagtgtttgtagccgccaacgggcatctctgccggggattcgccccaggtgttgatccagcaaatacccgcttccagctgatgaatgacgcgatgcgcgcggttcaggtccgctgtcacgatgcccgccgccaggccgtagtcggtatcgttagcgcggcgaatgacttcgtcttcgctctcgtaggtcagaatggacatcactggcccgaagatctcttcacgcacgatggtcatatcgtcgctgcaatcggtgaacactgtcggtgcaacccatgcgccgttatcgaagccatcgcctttcagtacatcgccgccgcacagtacgcgcgcgccttcctctttgcctttggcgatatagcgcagcacgttatcgcgatgcgggaagctgaccagcgggccgaagttagtttgcggatcgaaaacgtcgcccgcgcgaatgcgctcaacgcgcgccagaattttctgctcaaatgcggctttgcatttcgccggaacgaagacgcgggtgccattggtacacacctgaccggagctgaagaagtttgccatcatggcgatatcggcggcgagatcgagatccgcatcatcgaaaacgatcagcggacttttaccgcccagttccatggtcacttctttcagggaagaggccgcgctgttagccatcacttttttgccgctggcgacaccgccggtaaaactcactttggcaatgcccggatgctcggtcagatattgcccggtctccgcgcccacgcccggcaacacgttaaatacgccgtccggcaggcccgcttcgctgtaaatttcagccagctttaacgcggtaagcggggtaacttcgctcggtttgaaaatcattgcgttgcctgccgccagcgccggggcggatttccacagggcaatctggatcgggtagttccatgcgccaatccctgccactacgcccagcggttcgcggcgggtatacacaaaggacgtttcacgcaacgggatctggctgccttccagcgccgggatcagcccggcgtagtactccagcacgtccgcaccggtaacgatatcgacggtactggtttcgctatatgcttttccggtgtcgagggtttccagttttgcgagttcgtcattgcgttcacgcagaatatcaacggcccgacgcagaatacggctgcgctccatggcggtcatgctcgcccagattttttgcccctgctgggcgcttttcacggcgcgatcgacatcctcgcgcccggcggcctgcacggtcgccagcacgttaccgttggccgggttaatggtctcgaaggtgcgaccgctggtggcggaggtataaccaccatgtatataaagctgctgttctgccattcgggacatcacgtctcctcggttaatcggtgggtagatgctgagtgataaagtggcgggtcagggaattagcgcgggttttatccagcggtttgccgctcagagccgcgcgcagccataatccatcaatcagcgcggccaggccgtagcccgcttcctgtgcctgttcgcgcggcaattcgcgacgaaactcgctcaccagattgctcagcaagcggcggctgctgacctgctgtaaacgatagagcatcggctgatgcatactgctggcccagaacgccagccaggctttcatcgccgcactgctcacctgcgtttcatcgaagtttccgccaacaatcgcctgtaatcgctgctctgcactgccctgcggaagtgcatgtaatcgattcaaaaccgcgtcacgcagctgactggtgatatcgcgcatggttgcttccagcagaccatttttgtccctgaaatagtggctgatgatccccgtagaaacgcctgcacggcgggcgatctgcgcgatcgttgcatcgtgcatgcccacttcatttattgcttccagtgtggcgtcgatcagttgtctgcgccggatgctctgcatccccaatttgggcattttcgccactccattcatcagcggtgtttatctattaaagcggttattgattggacgttcaatataaaatgtgtcttaattgttacgaatttgattttaaatagtaacaataacagtggggatactggatgacagaccttagtcacagcagggaaaaggacaaaatcaatccggtggtgttttacacctccgccggactgattttgttgttttccctgacaacgatcctgtttcgcgacttcagcgccctgtggattggccgcacgctggactgggtttctaaaaccttcggttggtactatctgctggcggcaacgctctatattgtctttgtggtctgtatcgcttgtagccgttttggtagcgtgaagctcgggccagaacaatccaaaccggaattcagcctgctgagttgggcggcgatgctgtttgctgccgggatcggtatcgacctgatgttcttctccgtagccgaaccggtaacgcagtatatgcagccgccggaaggcgcgggacagacgattgaggccgcgcgtcaggcgatggtctggacgctgtttcactacggcttaaccggctggagcatgtatgcgctgatgggcatggcgctcggatactttagctatcgttataatttgccgctcaccatccgcagcgcgctgtacccgatcttcggtaaacggattaacgggccgataggtcacagtgtggatattgcagcggtgatcggcactatcttcggtattgccactacgctcggtatcggtgtggtgcagcttaactatggcttgagcgtactgtttgatattcccgatagcatggcggcgaaagcggcactgatcgccttgagcgtgataatcgccacgatctctgtcacctccggtgtcgataagggcattcgcgtgttaagcgagcttaatgtcgcgctggcgctgggattgatcctgttcgtattgtttatgggcgacactagcttcctgcttaatgcactggtgctgaatgttggcgactatgtgaatcgctttatgggcatgacgctcaacagttttgccttcgaccgtccggttgagtggatgaataactggacgctcttcttctgggcatggtgggtggcatggagcccgtttgtcggcttgttcctggcgcgtatcagccgtgggcgtaccattcgccagttcgtgctgggcacgttgattattccgtttaccttcacgctgttatggctcagcgtgttcggcaatagcgcgctgtatgaaatcatccacggcggcgcggcatttgccgaggaagcgatggtccatccggagcgcggcttctacagcctgctggcgcagtatccggcgtttacctttagcgcctccgtcgccaccattactggcctgctgttttatgtgaccagcgcggactccggggcgctggtgctggggaatttcaccagccagcttaaagatatcaacagcgacgcccccggctggctgcgcgtcttctggagcgtggcgattggcctgctgacgctcggcatgctgatgactaacgggatatccgcgctgcaaaacaccacggtgattatggggctgccgttcagctttgtgatcttcttcgtgatggcggggttgtataaatctctgaaggtagaagattaccgccgtgaaagtgccaaccgcgataccgcaccgcgaccgctggggcttcaggatcgcctgagctggaaaaaacgtctcagccgcctgatgaattatccgggcacgcgttacactaaacagatgatggagacggtctgttacccggcaatggaagaagtggcgcaggagttgcggttgcgcggcgcgtacgtggagctaaaaagcctgccaccggaagagggacagcagttgggtcatctggatttgttggtgcatatgggcgaagagcaaaactttgtctatcagatttggccgcagcaatatagcgtgccgggctttacctaccgcgcacgcagcggtaaaagcacctactaccggctggaaaccttcctgttagaaggcagccagggcaacgacctgatggactacagcaaagagcaggtgatcaccgatattcttgaccagtacgagcggcaccttaactttattcatctccatcgtgaagcgccgggccatagcgtgatgttcccggacgcgtgattgttattgcataaaaccgcgccatgtctgcatatggcgctgtttctcctacctcttgatacgttatatctatacggttaagcccttagtatctattgatgattaccagacaacagataataaaaaagaaaagaactattgcagcccaaaacctacatttgggctgttgcgaatgttcaataagtttagtcttatttaatgtaaatattgctgatcatttgaaatgacgcattattcatgagaaatgtgtatcgtaaatcaactgaaattaacgcaaccatttgttatttaaggtttaattatctgtgtgtgatattttattgaatgttttaaatattgtttttattggcattgctataatattggttatcatttgctgaatggattcagtcttaatgagtgggtttttaagggacaggcatagagtaatgatacgtatgcataaccaacatctttactcattatgtcattgaatgttgacgctatgtgtttatgagggagaggtattttcagttgatctggattgttaaattcatataatgcgcctttgctcatgaatggatgccagtatgtagtgggaaattataaatattgaaatagtccaactacttctttattaccaaaaatgagtatctgaattttaatattgcattcttgcgtgattatctcctgagtttgacttgtgattacctttttaaggtatttagcgtaactgtttttgagcgagcatcagaggtaaagataatcttcttgatagtgatgtgggatgttatacgtatggcatcgctgatgtttatggttaccccttatgtgtgctcaggaatcgacaggtaatcactcatactgaacagcgataaaagataaaggtgtgttcatgaatagttgtgattttcgtgtttttctgcaagagttcggtacaacggttcatttgagtttgcctggtagcgtatccgagaaagaacgactgctactcaagctgctgatgcagggaatgtctgtaacagaaataagtcagtacagaaatcgcagtgcaaagacaattagtcatcaaaagaaacagctctttgagaaactggggattcagagcgatattactttctggcgcgatattttctttcagtacaatccggagatcatatccgccacggggagtaatagtcacagatatattaatgataatcactatcaccatatcgtcacgcctgaagccatcagtctggcgttggaaaaccacgaattcaaaccgtggatccaaccggttttctgcgcgcagactggcgtactgacgggctgtgaggtgcttgtccgctgggaacatccacaaacgggaattatcccaccggatcagtttattcctctggcggagagttccggtcttattgtcataatgacccgccaactgatgaaacagactgcggatattctgatgccggtaaaacatttgctgccggacaatttccatattggcatcaacgtcagcgcgggttgttttttggcagcgggatttgaaaaagagtgtctgaacctggttaataaattaggtaacgataaaatcaagctggttctcgagctaacggaacgtaaccctattccggtaacgccagaagccagagcgatatttgacagccttcatcagcacaacattacctttgcgctggatgactttggtacgggttatgcgacctatcgttacttgcaggcgttcccggtcgattttattaagatcgataagagttttgtgcaaatggcgagtgtcgacgaaatctccggtcatattgtggacaatattgtcgaactagcgcgtaagcctggtctgagtatcgtggcggaaggggtagaaacccaggagcaggcggatttaatgatcggtaaaggcgttcactttttgcagggctatttgtactctccgccagtaccgggtaataaatttatctctgaatgggtaatgaaagcaggtggttgatgtaaaccgctattcacagcgcatcgggaggttggcagcgattaattctcccgatgcagtaaatcctgatagatccccgttaatatgccatttggcgcaaattgttttttaatccactgcgtcacctgacccgtagcagaatgctgagtcgccagtaacatgcggctatcctggcgcggattatggatttgtcgggtaaccagcagggattgcgtcatcgcctcacggaccatgtaatccggcaaaaaaccaattccttcacctaaaatctggcactgacatttggtgttgaaatctggcaccagaatactctcctgcccgtgcagcaaccagcccacttttttattaatcgtatgcgcggtgtcctccaccataatattagggtagagacgcagttggctttcggcgatgggttccggcacaaaggctaacgggtgatccggggcgatagcaaaagcccagcgaatcgcgccaatttcagtgtaatcaataccgccgccgtccagtagtgtatcgggtgcgccgatggcgatattggcctgattattaataatcgcatcccagacgccgttatacacttcggtggtgacggtaatctggcaggtaggaaactgctttttcagcacctgtaacaagcgtgcggtgtgtttgggcgtataaagcagctgattaatacaaatgcgcacacgcgcttctatgccctggctaatagtatcgattctgcgtttgatggcataaaaatcattcagcaggtcggtagctttgcggaaaaaataacgcccggactccgttaactcaatgctgcgggtactgcgagtgaacagcaccacatccagccccgtctccatacgcttaatggtgtagctaatggcggaagtggttaaacccaactcttctgcggctttactgaagctgccaaaacgcgcagcggtagtaaatgccaacagattctcttcggtaaaaatactgttcattaaaccattctcgccattatctactatgaatttctccagctatgactgtagaggtatcggttaaagatagataatcatttttgaataacttttaatacccgtcgcgtttagtcgtcgcttcgcttaatttttgtccaccatattcactaattacccccacgcagttacccgccagaaaacccagtaacgtcaccgtccagttcatcccgctggcaaaaaacagcgtcatgccgagaaagccaccgggaataaaggacagtaaccagaaacgcccttgccagaccactaccgcgctgaagggtacggtagtaattacgctcgcccagaacgcggacagtccacttacagaggccagccaaccagcagtcagcgcggcgaaaaacgcccacaccatcccggaataattaaccgccagacttctgataaacccgcttttaccgccgcctgcggcataaaaactgcaaaaggcgacgaagccaatggttcctaataattcccatccttgagagagcccgacatgactagacactaactgccaaagccctgcacaaataccgacggtgacacccgttgccgtgagtccgttcatcttgttcccctctggttagacatggacgaaagctactcttacatgtgcagactatagagaaataaaacctgattgagtgaaagggtatcgggtcaaagaaacaaatattgcactaccgcacactgcgaaaagattgttgaatattattcaacaaaaaggcgagatacggcgaattaaatttaagcgggttcttttatcagattatcgttgctattctcaattcatcgaaaacagccacaaaaaccaggggaatgtgaatgagtataaaaaatctacctgccgactatttattggctgcacaacagggtgatatcgataaagtaaaaacctgccttgcgctgggtgtcgatattaatacctgcgatcgtcaggggaaaacggcaattacgctggcaagtttatatcagcaatatgcttgcgttcaggcattaattgatgccggagcggatattaataagcaagattatacctgtttaaatccttttttaattagctgtctgaacgatgatttaacgctactacgaattattttaccggctaaacccgatcttaattgcgtaacccgttttggcggtgtcggcctgacgcctgcctgtgaaaaaggccatttaagtattgtaaaagagcttttggcgcatacggagattaacgttaaccagaccaaccatgtaggctggacgccgctactggaagcgattgtgcttaatgatggtggtattaaacagcaggcgattgtgcagttattgctggaacacggtgccagcccgcatctgaccgataaatatggcaaaacgccactggaactggcgcgggaacggggctttgaagagattgcgcagttactgattgccgcaggtgcataaaccgggaggcttgctatcaacacaccagaaagacggtgtgtgtgggcgctaactgcggatgcggattttctggcgcagcgggggcaaggacaggttgaacaggtctttgccagagcggtaaatatcgcactcccggctcgccagcagttgctgacgctgctttgtgaagagtacgacaatgcgccaaacagttgtcggttggcactcactcactttgatgatctgttccggcatggtgataaggttcagtttgacgatcaaggtattacggttggtcaacatcttcatatagagatgagtcgttgtcggcgttggctgtccccaaccttgcaaatgaccgctgtgaattttcaccttatcgcctggctacagtggcacgacattattcatcagcacctgggggaaaatgaaaccctgtttaattatcgcggcgataatccgttttatcaggcgttaaataaagaattacatattaaacgacgggcagttattcaggccgtaaacgataaacaaaatatcgccagtgcggtcgccagtatgatggggttagggattggccttacgccaagtgccgacgattatttaacaggtctggcgcttattttatttattcccgggcatccggcggaaaaatacaaagaggaattttatctcggtctgcaacgcggcaaaaataataccacattattaagtgccataacgctggaagccgcattacaacaacgctgccgggaaaatattcatcgttttattcacaacattatttatgacatccctgggaacgcaactcaggcaatagaaaaaattaaacatattggctccagttccggctgcgacatgctgtatggcatggccgatggttgtgcgctgagccaaacctacggagggaattatgtcagttaattaaccaaacctacggagggaattatgagtgttaaaatagtcattaaaccgaatacctattttgattctgtcagcctgatgtctatctccacgcgtgcaaataaactcgacggcgtcgagcaggcatttgtggcgatggcgaccgaaatgaataaaggcgtgctgaagaatttaggactgctgacgccggagctggagcaggcgaaaaacggcgacctgatgattgtcatcaatggtaaaagcggtgcggacaacgagcagttactggtggagattgaagaactgttcaacaccaaagcgcaaagcggcagccacgaggcgcgttacgccactattggcagcgccaaaaagcatatcccggaaagtaacctggcggtgattagcgtcaacggtctgtttgccgctcgcgaagcgcgtcaggcgctgcaaaacgatctcaacgtgatgctgttttccgataacgtcagtgttgaagatgaactggcgctcaagcaactggcccacgaaaaagggctgctgatgatggggccagactgtggcacggcgattatcaacggcgcggcgctctgttttggtaacgccgtgcgtcgcggcaacatcggtattgttggcgcatccggcaccggcagtcaggagttgagcgtccgcattcatgaatttggcggcggcgttagccaactgattggcaccggcgggcgcgacctgagcgagaaaatcggcggcctgatgatgctcgacgccatcgggatgctggaaaacgatccgcaaactgaaatcattgcgcttatctccaaaccgcctgcgcctgcggtggcccgcaaagtgctggaacgtgcgcgcgcctgccgcaagccggtggtcgtctgcttcctcgatcgtggcgaaacgccagtggatgagcaggggctacagtttgcccgcggcaccaaagaggcagcgctaaaagcggtgatgctctccggcgtgaaacaggaaaatctcgacctgcatacgcttaaccagccgttgattgcggatgtgcgtgcgcgtctgcaaccgcagcagaaatacattcgtggcctgttctgcggcggcacgctgtgcgacgaaaccatgttcgcggtgatggaaaaacatggcgatgtctacagcaacattcagcccgatccggaattccgcctgaaagatatcaaccgcagcatcaaacacaccttcctcgactttggcgatgacgacttcaccaatggcaagccgcacccgatgattgaccccaccaaccgcatcagtcgcttgatcgaagaggcgcgcgatccagaagtggcggtgatcgtgatggattttgtgctcggatttggaagccatgaagatccggtcggctccaccatcgagacgatcaaagaagcgaaagcgatcgccgctgccgaaggacgcgagttgatcattctcgcctatgtgctgggtaccgatcttgatacgccaagcttagaacaacaaagccagatgctgcttgatgccggagtgattctggcgagcagcagcaccaataccggattgctggcgcgtgaatttatctgcaaaggggaggaagcctgatgagccagagtctgtttagccaaccattgaacgttattaacgtcggcatcgccatgtttagcgatgacctgaaaaagcagcatgtagaagtgactcaactcgactggacgccgccggggcagggcaatatgcaggtggtgcaggcgctggataacattgccgatagcccgctggcggacaaaatcgccgccgctaaccagcaggcgctggagcgtattatccagagccatccggtgctgattggttttgatcaggcgattaacgtggtgccgggcatgacggcgaaaaccattcttcacgccgggccgccgatcacctgggaaaaaatgtgcggcgcgatgaaaggcgcggtcaccggagcgctggtgttcgaaggactggcgaaagatctcgacgaggcggctgaactggcggcttccggggagatcaccttcagcccgtgtcacgagcacgactgcgtgggaagcatggcgggtgttaccagcgccagcatgtttatgcacatcgtaaaaaacaaaacctacggcaacatcgcttataccaacatgagcgagcagatggcgaagattttgcgtatgggcgctaacgaccagagcgtgattgaccgcctgaactggatgcgtgatgtgcagggaccaatactgcgcgacgcgatgaaaattatcggcgaaatcgatctgcgcttaatgctggcgcaggcgctgcatatgggcgatgagtgccataaccgcaataacgccgggacgacactgctgattcaggcgctgacgccggggattattcaggcgggttattccgtcgagcaacagcgcgaagtgtttgagtttgtcgccagcagcgactacttctccggcccgacgtggatggcgatgtgtaaagcggcgatggatgcggcgcatggcatcgaatacagcaccgtggtcaccaccatggcgcgtaacggcgtcgagttcggcctgcgggtcagcggcctgccggggcaatggtttaccggcccggcgcagcaggtgatcggcccgatgtttgccggttataagccggaagatagcgggctggatatcggcgacagcgccatcaccgaaacctacggtattggcggatttgctatggcgaccgcgcccgctatcgtcgcgctggtgggcggcacggtggaagaagctattgatttctcccgtcagatgcgcgaaatcaccctcggtgaaaaccccaacgtcaccattccgctgctcggttttatgggcgtgccgagcgcaatcgacatcacccgcgtgggtagcagcggcattctgccggtgatcaacaccgccatcgcccataaagatgcgggcgtcggcatgattggcgcgggcattgtgcatccaccttttgcctgcttcgagaaagccattcttggctggtgcgaacgttacggcgtctgacctacatgttcatgccggatgcggcgtgaacgccttatccggcctacgaatggcgcaagaatctgtaggcctgataagcgtagcgcatcaggcatttgtcaccattgccggatgcggcgtgaacgccttatccggcctacgaatggcgcaagaatctgtaggcctgataagcgtagcgcatcaggcatttgccaccactgccggatgcggcgtggacgccttatccggcctacgagtggcgcgagaatctgtaggcctgataagcgtagcgcatcaggcatttgtcaccattgccggatgcggcgtgaacgccttatccggcctacgagtggcgcgagaattgtaagcctgataagcgtagcgcatcaggcagtctggcgttggtcataaccccatcaccctctgtagcggacataacaacatgaaagagcttgtggtcgttgccattggtggcaacagcattatcaaagataacgccagccagagcattgagcatcaggcggaggcggtgaaagccgtcgccgatacggtgctggaaatgctggcttccgattacgacattgtgctgacccacggcaacgggccgcaggtcgggctggatttacgccgtgcggagattgcccacaagcgcgaagggctgcccttaacgccgctggcgaactgtgtggcagatacgcagggcggcatcggctatctgatccaacaggcgctgaataaccggctggcgcgtcacggcgagaagaaagccgtcaccgtggtgactcaggtggaagtggataaaaacgatccaggttttgcccatcccaccaagcccatcggcgcattctttagtgacagccagcgtgacgaattacaaaaggcaaaccctgactggtgttttgttgaagatgccgggcggggctatcgccgcgtggtcgccagcccggaaccgaaacgtattgtcgaagcacctgccattaaagcgctgatccaacaaggttttgtcgtaattggcgcgggcggcggtggaattccggtagtgcgtactgacgcgggagattaccaaagcgtggacgcggttatcgacaaagatctctctaccgcgctgctggcccgtgaaattcacgccgacattcttgtgatcaccactggcgtcgaaaaagtgtgtattcactttggcaaaccgcagcagcaggcgctcgatcgggtggatattgccaccatgacccgctatatgcaggaagggcatttcccgcccggcagcatgttgccaaaaatcatcgccagcctgacatttttagaacaaggcggcaaagaagtgattatcaccacgccggaatgcctgcctgcggcgctgcgcggcgaaacgggcactcatattattaaaacgtaaggacgtaagatgaaagaaagcaatagccgccgtgaatttctgagccagagcggtaagatggtcaccgccgccgcgctgtttggtacctctgtgccgctcgcccatgcggcggtagctggcaccctaaactgcgaagcgaacaacaccatgaaaatcactgacccgcattactatctcgataacgtgctgctggaaaccggttttgactacgaaaatggcgtggcggtgcagacccgcacggcgcgccagaccgtggagattcaggacggcaaaattgtcgccctgcgcgagaacaagctgcatccggacgccacgctgccgcactatgacgctggcggtaagctgatgctgcccaccacccgcgacatgcatattcatctcgacaaaaccttttacggcgggccgtggcgcagcctcaatcgtccggcaggcaccaccatccaggacatgatcaaactcgagcagaaaatgctgccggaactgcaaccgtacactcaggagcgggcagaaaaactgattgatttattgcagagcaaaggcaccaccattgcccgcagccactgcaatatcgaaccggtttccggcctgaaaaatctgcaaaatttgcaggcggtgctggcgcgacgtcaggcgggctttgagtgtgaaatcgtcgccttcccgcagcacggtttgctgctgagcaaatctgaacctttaatgcgtgaagcgatgcaggcgggggcgcattacgtcggcggcctggacccgaccagtgttgatggcgcgatggaaaaatccctcgacaccatgttccagattgcgctggactacgacaaaggcgtcgatattcacctgcacgaaaccactccggcaggcgtggcagccatcaattatatggttgaaacggtagagaaaacgccacagctgaagggcaagctgaccatcagtcacgcctttgcgctggcaacgctcaacgagcaacaggtagatgaactggcgaaccggatggtggtgcaacaaatttctatcgccagcacggtgccgattggcacgctgcatatgccgctcaaacagttgcacgacaaaggcgtaaaagtgatgactggcactgacagcgttatcgaccactggagcccttatggtctgggcgacatgctggaaaaagccaatctgtacgcgcagctctatattcgtcctaacgaacagaacctctcccgcagcctgtttttagccactggcgatgtattgccgctgaatgaaaaaggcgagcgtgtatggccaaaagcgcaggatgacgccagctttgtgctggtggacgcctcctgttccgccgaggcggtggcgcgtatcagcccgagaaccgcaacgttccataaagggcaactggtgtgggggagtgtggcaggttgatgcgcatttgaaacgcctgcaacggtgaatagtaagagatttaagccccagggagtggggcaatctgaatatgagtgtgtcggcagaaatggacattatctttgaggaatatgcccttattgacgttgtgtagataactatttgtctacgtgaaaagatcatcagttttgccgattttagtcttttacagatagcaaatatcacacttacaggcgctcgccttatggggaacgttgctgctctgtttcattcaggctcgcggcatgttggggctggatcgggtggtttaaatattggctatattcaatggacgcgttttgccgcgatgacatatcaggcgttgccaaatacacatagctaatcaggagtaaacacaatgaagatcaaagctgttggtgcatattccgctaaacaaccacttgaaccgatggatatcacccggcgtgaaccgggaccgaatgatgtcaaaatcgaaatcgcttactgtggcgtttgccattccgatctccaccaggtccgttccgagtgggcggggacggtttacccctgcgtgccgggtcatgaaattgtggggcgtgtggtagccgttggtgatcaggtagaaaaatatgcgccgggcgatctggtcggtgtcggctgcattgtcgacagttgtaaacattgcgaagagtgtgaagacgggttggaaaactactgtgatcacatgaccggcacctataacagcccgacgccggacgaaccgggccatactctgggcggctacagtcaacagatcgtcgttcatgagcgatatgttctgcgtattcgtcacccgcaagagcagctggcggcggtggctcctttgttgtgtgcagggatcaccacgtatagcccgctacgtcactggcaggccgggccgggtaaaaaagtgggcgtggtcggcatcggcggtctgggacatatggggattaagctggcccacgcgatgggggcacatgtggtggcatttaccacttctgaggcaaaacgcgaagcggcaaaagccctgggggccgatgaagttgttaacagtcgcaatgccgatgagatggcggctcatctgaagagtttcgatttcattttgaatacagtagctgcgccacataatctcgacgattttaccaccttgctgaagcgtgatggcaccatgacgctggttggtgcgcctgcgacaccgcataaaagcccggaagttttcaacctgatcatgaaacgccgtgcgatagccggttctatgattggcggcattccagaaactcaggagatgctcgatttttgcgccgaacatggcatcgtggctgatatagagatgattcgggccgatcaaattaatgaagcctatgagcgaatgctgcgcggtgatgtgaaatatcgttttgttatcgataatcgcacactaacagactgaaaaaattaataaataccctgtggtttaacatattaacttcgctctccacttaactttttagttaaggagagcgaaataatatcaaagtagcagtaaaacctataacgtaaatttaaattgttaaattaacgccctccagtacacaatacttcacacgttagttatgagcgatttctgatagtgcctggtttaatcagagctttattatctgcgacgtttatttttatttaagagagatcgcgatgataagtttaaaagctccgcacaataatttgatgccatatacgcaacaaagcatacttaatacggttaaaaacaatcagttaccagaggatatcaaaagctccctggtttcctgtgtcgatatattcaaggttttgattaaacaatattatgattatccttatgattgtcgtgatgatttagtcgatgacgacaaactcattcatctcatggctgccgtacgagactgtgagtggagtgacgataacgcactcaccataaatgtgcagtttaatgatttccctggattttatgactggatggattaccctgatcacccggttaagtttgtttttcacatacttgaaaatcaaaaagggacagtttgggtatatgaccaggatgatgcgtttcttgatattaaagcaaacgtgcaggctggacgctttaccgggcttaagaaattagtgcagtttatcgatagtgtgcgaacagattgcaaatgtattcttcttgaataccatatgcctttgctgagaattttccctaaagggaaagagtgtatgcatgtggaaaaatggcttcgcgaaatgagctctattccggagacagacgcgcccattaagcaggcgcttgcgcatggattattattacacttaaaaaatatctaccctgtttttcctgaaagtctggtgatgttattgctctctgttctggacgtaaaaacatacagagatgatgcgcgattaaatgaatggatatctaatagagtgcaggaattaggtgacagatattatcctgtaaataagcacgttaaaatccgctacactctttaattcagaaagggttccacctgcaagttgttattccacctgagagtgaatcgcaatgcaggtaatcatttcatctgtatatctgtatgccaactggcattccatctcttttttcgccgatattttgttgtgatcggcgacacttcgcttaaaaaagcaccagtagtggtttcgcagccatgcggtgtataaaaaatgatctcatgcagatgttttgtgaatgtgttggttgacattcatatgaaaaaaatcataattccatcatgtttgtgtggggtcttttctgtatcttacgcatcgcactcaagcctgacagaaaatatgctgtaaggctcatatcaaaaaccgccattagctcatcaggaagagcagacgacaaccaggattgttgtatggtacggggttcgaggcctcgatggcggtccaacttttcaaaactcttctgaatcagatccccttattaagttccctgcaaagtggaacattgccattgtttggctatagtggatggggcagaccaatgaaaaaagcccacacaggggagagtgggctgaaatgggaggctaaagacagtagtaaacttatcggaaataaggaccacgcattacgggggctaagtagcccgatggccgtgattcggcaaatcaggttgattacgtaaagagtaaattatctgctcaccgctgcgtcaccccttcgtaaatcaggcgtagcgcgaatacaccaataattgcaccaataacccgactggcaacgcgttgcatacgcccataagcacgacgcacagcgggcaaagaaaacgcctgactaagaaaaactcgccagataatacttgcgagcacaatccccgcccaggccattaaacgtgcccatgttggtgtttctgcatttaatgttacactgaaaatactgataaaaaataaaacggtttgcgggttagagagatcggtaattaatccgcggcgaaaaaagacataccagggggcgctaatcggttgttgtagtgtgctcatttgcggtgtactctggcggcgcatgctgcaccacgcaaaccataagagataagcgccgccgacgattctgataaggctaaaaatctcctcacactgcgtaattagcgttgcaagaccaaacaaacccaacccggaataaaatgcatcgcccagcgccacgcccagcccggtcagcacccctgcgcgtcgaccggaagccaggctggtttgtactaccacaaagagattggctcccggattaaaaaaagtaatcacgaacagtcctacggtcaggtaaacggcatgcaaaggatccatagtgatttcatccataaataagtgaactaactgcatcatatttctaccaaaaataatcgggtgcgagagagatcacaaagtgtcttatttccggttactggcgtttatgccctgactgaactaattattaatcaacccaataatgtgggtgggtgatagtgtgataacaactctggagccgtaatatgaaaataatctctaaaatgttagtcggtgcgttagcgttagccgttaccaatgtctatgccgctgaattgatgaccaaagcggaatttgaaaaagttgaaagccagtatgaaaaaataggtgatattagtaccagcaatgaaatgagcactgcagatgcaaaagaagatttgatcaaaaaagcggatgaaaaaggggctgatgtgttggtactgacctccggtcaaactgacaataagatccacggcacggcaaatatttataagaagaagtaattctgaatcctatgtaaacatctccgatgcgtaagtttatcggtgatcatctattgaaatttatgccggataaagcgttcgcgctgcattcggcagttcagcttttcagccgccgccagaacgtcgtccggctgatgcctaaataattcgccgctgctgttttatcgccattaaatttctccagtgcctgttgtggtgtcagtaagcgtggagcgggagttttcgcgctctcgcgcgccagttccggcagtagcagttgcataaactgcggcgttaaatccggcgtcggttccacacttaaaaacagcgccagtcgttccatcatattgcgcagttcacgaatattgcctggccagtcgtagtgcagcagcacagtttcacttgcctgtaacccctggcgtaatgcagcagaaaatggggcggagagcgccgccagagacactttcaaaaagctttccgccagcggaagaatatccgccacccgctcgcgcagtggtggcaattgcagacgcaaaatactcagccgataaaacagatcacggcgaaaacgtccttgctgcatatcttcttccagattgcagtgagtggcgctaatgacccgtacatctaccggaacaggctgatgcccgccgacgcgggtgacctctttttcttccagcacccgcagcagccgggtctgcaaaggtagcggcatttcgccaatctcatccagaaacagcgtaccgccgtgggcaatttcgaacagcccggcgcgacctccgcgtcggctgccggtaaacgccccttcctcatagccaaacagttctgcttccagcaggctttcggcaatcgccccgcagttgacggcaacaaacggatggctctttttgccctgtcgcgcatcgtggcgggcaaaatattcccgatgaatcgcctgggccgccagctctttgcccgtccccgtttccccctcaatcaacaccgccgcactggagcgggcatacagcaaaatagtctgccgtacttgttccatctgtggactttgaccgagcatatcgcccagcacgtaacgagtacgcagggcgttgcgggtggcatcgtgagtgttatggcgtaagctcatgcgcgtcatatccagcgcatcgctgaacgcctggcgcacggtggcggcggaatagataaaaattccggtcattccggcttcttctgccaaatcggtaatcagccctgcgccgaccaccgcttcggtgccgttagcttttagctcgttaatctgcccgcgtgcgtcttcctcggtaatgtagctacgttggtcgaggcgcaaattaaaggttttttgaaacgccaccagcgctggaatggtttcctgataggtgacaacgccgatagaagaggtgagttttccggcttttgccagtgcctgtaacacatcgtagccgctcggtttaatcaaaataactggcacactcaggcggcttttcaggtacgcgccgttagagccagccgcgatgatggcgtcacagcgttcgtttgccagtttcttgcggatgtaggtcactgctttttcaaagccaagctgaataggggtaatgttcgccaggtgatcaaactcgaggctgatatcgcgaaacagctcgaacaggcgcgttacagataccgtccagataaccggtttgtcgtcattaagccgtggtggatgtgccatagcgcaccgcaaagttaagaaaccgaatattgggtttagtcttgtttcataattgttgcaatgaaacgcggtgaaacattgcctgaaacgttaactgaaacgcatatttgcggattagttcatgactttatctctaacaaattgaaattaaacatttaattttattaaggcaattgtggcacaccccttgctttgtctttatcaacgcaaataacaagttgataacaaaggatgggctatgtctctacactctccaggtaaagcgtttcgcgctgcactgactaaagaaaatccattgcagattgttggcaccatcaacgctaatcatgcgctgttggcgcagcgtgccggatatcaggcaatttatctttctggcggtggcgtggcggcaggtagcctggggctgcccgatctcggtatttctacccttgatgatgtgctgaccgacattcgccgtatcaccgacgtttgtagcctgccgctgctggtggatgcggatatcggttttggttctagcgcctttaacgtggcgcgcaccgtgaaaagcatgattaaagccggtgcggcaggattgcatattgaagatcaggttggtgcgaaacgctgcggtcatcgtccgaataaagcgatcgtcagcaaagaagagatggtggatcggatccgcgcggcggtggatgcgaaaaccgatcctgattttgtgatcatggcgcgcaccgatgctctggcggtagaggggctggatgcggcgatcgagcgtgcgcaggcctatgttgaagcgggtgccgagatgttgttcccggaggcgattaccgaactcgccatgtaccgccagtttgccgatgcggtgcaggtgccgatcctcgccaacatcaccgaatttggtgccacgccgctgtttaccaccgacgaattacgcagcgcccatgtcgcaatggcgctgtacccacttagtgcgttccgcgccatgaaccgcgccgctgaacatgtctacaacgtcctgcgccaggaaggcacgcagaaaagcgtcatcgacaccatgcagacccgcaacgagctgtacgaaagcatcaactactaccagtacgaagagaagctcgacaacctgtttgcccgtagccaggtgaaataaaaaacgcccgttgattgtattcgacagccgatgcctgatgcgtcgctgacgcgacttatcaggcctacgaggtgcactgaactgtaggtcggataagacggatggcgtcgcatccgacaaccgatgcctgatgcgccgctgacgtgacttatcaggcctacggggtgcactgaactgtaggtcggataagacgcatagcgtcgcatccgacaaccgatgcctgatgcgccgctgacgcgacttatcaggcctacggggtgcactgaactgtaggtcggataagacgcatagcgtcgcatccgacaaccgatgcctgatgcgccgctgacgcgacttatcaggcctacggggtgaactgaactgtaggtcggataagacgcatagcgtcgcatccgacaacaatctcgaccctacaaatgataacaatgacgaggacaacatgagcgacacaacgatcctgcaaaacagtacccatgtcattaaaccgaaaaaatctgtggcactttctggcgttccggcgggcaatacggcgctctgcaccgtgggtaaaagtggcaatgacctgcattaccgcggctacgatattcttgatctggcgaaacattgcgaatttgaagaagtggcgcatctgctgatccacggcaaactgccgacccgtgacgaactcgccgcttacaaaacgaaactgaaagccctgcgcggtttaccggctaacgtgcgtaccgtgctggaagccttaccggcggcgagccacccgatggatgttatgcgcaccggtgtttccgcgctcggctgcacgctgccagaaaaagaggggcataccgtctctggcgcgcgggatattgccgacaaactgctggcgagccttagcagcattctcctttattggtatcactacagccacaacggcgaacgcatccaaccggaaaccgatgacgactccatcggcggtcacttcctgcatctgctgcacggcgaaaagccaagccaaagctgggaaaaggcgatgcatatcagcctggtgctgtacgccgaacacgagtttaacgcctccacctttaccagtcgggtgattgcgggcaccggctctgatatgtattccgcgattattggcgcgattggcgcactgcgcgggccaaaacacggcggggcgaatgaagtgagcctggagatccagcaacgctacgaaacgccggacgaagccgaagcagatatccgcaagcgcgtggaaaacaaagaagtggtcattggttttggtcatccggtttacaccatcgctgacccgcgccaccaggtgattaaacgtgtggcgaagcagctcagccaggaaggcggcagcctgaagatgtacaacatcgccgatcgcctggaaacggtgatgtgggagagcaaaaagatgttccccaatctcgactggttctctgctgtttcctacaacatgatgggcgttcccaccgagatgttcacaccactgtttgttatcgcccgcgtcaccggctgggcggcgcacattatcgaacaacgtcaggacaacaaaattatccgtccttccgccaattatgttggaccggaagaccgcccgtttgtcgcgctggataagcgccagtaaacctctacgaataacaataaggaaacgtacccaatgagtgctcaaatcaacaacatccgcccggaatttgatcgtgaaatcgttgatatcgtcgattacgtcatgaactacgaaatcagctctaaagtggcctacgacaccgcacattactgcctgctcgacacgctcggctgcggtctggaagctctcgaatacccggcctgtaaaaaactgctggggccaattgttcccggcaccgtcgtacccaacggcgtgcgcgtccccggaactcagttccagctcgaccccgtccaggcggcatttaacatcggcgcgatgatccgctggctcgatttcaacgatacctggctggcggcggagtggggccatccttccgacaacctcggcggcattctggcaacggcggactggcttagccgcaacgcggtcgccagcggcaaagcgccgttgaccatgaaacaggtgctgaccgcaatgatcaaagcccatgaaattcagggctgcatcgcgctggaaaactcctttaaccgcgtcggcctcgaccacgttctgttagtgaaagtggcttccaccgccgtggtcgccgaaatgctcggcctgacccgcgaggaaattctcaacgccgttagcctggcgtgggtggacggtcagagcctgcgcacctatcgccatgcgccgaacaccggcacgcgtaaatcctgggcggcgggcgatgccacttcccgcgcggtacgtctggcactgatggcgaaaacgggcgaaatgggttacccgagtgccctgactgcgccggtgtggggcttctacgacgtctcctttaaaggtgaaagcttccgcttccagcgcccgtacggttcctacgttatggaaaatgtgctgttcaaaatctccttcccggcggagttccactcccagacggcagttgaagcagcgatgacgctctatgaacagatgcaggcagcaggcaaaacggcggcggatatcgaaaaagtgaccattcgcacccacgaagcctgtattcgcatcatcgacaaaaaagggccgctcaataacccggcagaccgcgatcactgcattcagtacatggtggcgatcccgctgctattcgggcgcttaacggcggcagattacgaggacaacgttgcgcaagataaacgcattgacgccctgcgcgagaagatcaattgctttgaagatccggcatttaccgctgactaccacgacccggaaaaacgcgccatcgccaatgccattacccttgagttcaccgacggcacacgatttgaagaagtggtggtggagtaccccattggtcatgctcgccgccgtcaggatggtattccgaaactggtcgataaattcaaaatcaatctcgcgcgccagttcccgactcgccaacagcagcgcattctggaggtttctctcgacagagctcgcctggaacagatgccggtcaatgagtatctcgacctgtacgtcatttaagtaaacggcggtaaggcgtaagttcaacaggagagcattatgtcttttagcgaattttatcagcgtagcattaacgaaccggagcagttctgggccgagcaggcccggcgtattgactggcagacgccctttacgcaaacgctcgatcacagcaatccgccgtttgcccgttggttttgtgaaggccgaaccaacttgtgccacaacgccatcgaccgctggctggagaaacagccagaggcgctggcgctgattgccgtctctagcgaaacagaagaagagcgcacctttacctttcgtcagctgcatgacgaagtgaacgcggtggccagtatgttgcgtagtttgggtgtgcagcgcggcgatcgggtgctggtgtatatgccgatgattgccgaagcgcatattactctgctggcctgcgcgcgcattggcgctattcacagcgtggtgtttggtggatttgccagctacagcgtggcggcgcgaattgatgacgctaaaccggtgctgattgtcagcgctgatgccggagcgcgcggtggcaaaatcattccctataaaaaattgctcgacgatgcgataagtcaggcgcagcaccagccacgccatgttttgctggtggatcgcgggctggcgaaaatggcgcgcgtcagcgggcgggatgtcgatttcgcgagcttgcgccatcaacacatcggcgcgcgggtaccggtggcgtggctggaatccaacgaaacctcctgcattctctacacttccggcacgaccggcaaacctaaaggcgtgcagcgtgacgtcggcggatatgcggtggcgctggcgaccagcatggacaccatttttggcggcaaagcgggcagcgtgttcttttgcgcaagcgatatcggctgggtggtggggcatagctatatcgtttacgcgccgctgctggcggggatggcgactatcgtttacgaaggattgccgacctggccggactgcggcgtgtggtggacaatcgtcgagaaatatcaggttagccggatgttcagtgcgccgaccgccattcgcgtgctgaaaaaattccctaccgctgaaattcgcaaacacgatctcagcagcctggaagtgctctatctggctggagaaccgctggacgagccgaccgccagttgggtgagcaatacgctggatgtgccggtcatcgacaactactggcagaccgaatccggctggccgattatggcgattgctcgcggtctggacgacaggccgacgcgtctgggaagccccggtgtgccgatgtatggctataacgtgcagttgcttaatgaagtcaccggcgaaccgtgtggcgtcaacgagaaagggatgctggtggtggaagggccgctgccgccggggtgtattcagaccatctggggcgacgacggccgctttgtgaagacttactggagcctgttttcccgcccggtgtacgccacctttgactggggcatccgtgacgctgacggttatcactttattctcgggcgcactgacgatgtaattaacgttgccgggcatcggctggggacgcgcgagattgaagagagtatctccagccatccgggcgttgccgaagtggcggtggttggggtgaaagatgcgctgaaagggcaggtggcggtggcgtttgtcattccgaaagagagcgacagtctggaagatcgtgatgtggcgcacagccaagagaaggcgattatggcgctggtggacagccagattggcaactttggccgcccggcgcacgtctggtttgtcagccaattgccaaaaacgcgatccggaaaaatgctgcgccgcacgatccaggcgatttgcgaaggacgcgatcctggagatctgacgaccattgatgatcctgcgagcttggatcagatccgccaggcgatggaagagtaagttattgtcggatgcgtcgcgcggtgcatccggcactgtgtgccgatgcctgatgcgacgctgacgcgttttatcatgcctacggacctgaaccgtaggtcggataaggcgctcgcgtcgcatccgacaccatgctcagatgcctgatgcgacgctgacgcgtcttatcaggcctacccactgtttttacaccgataatttttcccccacctttttgcactcattcatataaaaaatatatttccccacgaaaacgattgctttttatcttcagatgaatagaatgcggcggattttttgggtttcaaacagcaaaaagggggaatttcgtgagccaagataacaactttagccaggggccagtcccgcagagcgcgcggaaaggggtattggcattgacgttcgtcatgctgggattaaccttcttttccgccagtatgtggaccggcggcactctcggaaccggtcttagctatcatgatttcttcctcgcagttctcatcggtaatcttctcctcggtatttacactagttttctcggttacattggcgcaaaaaccggcctgaccactcatcttcttgctcgcttcagctttggtgttaaaggcagttggctgcctagtctgctactgggcggaactcaggttggctggtttggcgtcggtgtggcgatgtttgccattccggtgggtaaggcaaccgggctggatattaatttgctgattgccgtttccggtttactgatgaccgtcaccgtcttttttggcattagcgcgctgacggttcttagcgtgattgcggttccggctatcgcctgcctgggcggttattccgtgtggctggctgttaacggcatgggcggcctggacgcattaaaagcggtcgttcccgcacaaccgttagatttcaatgtcgcgctggcgctggttgtggggagttttatcagtgcgggtacgctcaccgctgactttgtccggtttggtcgcaatgccaaactggcggtgctggtggcgatggtggcctttttcctcggcaacagcttgatgtttattttcggtgcagcgggcgctgcggcactgggcatggcggatatctctgatgtgatgattgctcagggcctgctgctgcctgcgattgtggtgctggggctgaatatctggaccaccaacgataacgcactctatgcgagcggtttaggtttcgccaacattaccgggatgagcagcaaaacccttagcgtaatcaacggtattatcggtacggtctgcgcattatggctgtataacaattttgtcggctggttgaccttccttagcgcagctattcctccagtgggtggcgtgatcatcgccgactatctgatgaaccgtcgccgctatgagcactttgcgaccacgcgtatgatgagtgtcaattgggtggcgattctggcggtcgccttggggattgctgcaggccactggttaccgggaattgttccggtcaacgcggtattaggtggcgcgctgagctatctgatccttaacccgattttgaatcgtaaaacgacagcagcaatgacgcatgtggaggctaacagtgtcgaataactaagacgcatgtggaggctaacagtgagcaataacgctttacaaacaattattaacgcccggttaccaggcgaagaggggctgtggcagattcatctgcaggacggaaaaatcagcgccattgatgcgcaatccggcgtgatgcccataactgaaaacagcctggatgccgaacaaggtttagttataccgccgtttgtggagccacatattcacctggacaccacgcaaaccgccggacaaccgaactggaatcagtccggcacgctgtttgaaggcattgaacgctgggccgagcgcaaagcgttattaacccatgacgatgtgaaacaacgcgcatggcaaacgctgaaatggcagattgccaacggcattcagcatgtgcgtacccatgtcgatgttagcgatgcaacgctaactgcgctgaaagcaatgctggaagtgaagcaggaagtcgcgccgtggattgatctgcaaatcgtcgccttccctcaggaagggattttgagctatcccaacggtgaagcgttgctggaagaggcgttacgcttaggggcagatgtagtgggggcgattccgcattttgaatttacccgtgaatacggcgtggagagcctgcataaaaccttcgccctggcgcaaaaatacgaccgtctcatcgacgttcactgtgatgagatcgatgacgagcagagccgctttgtcgaaaccgttgctgccctggcgcaccatgaaggcatgggcgcgcgagtcaccgccagccacaccacggcaatgcactcctataacggggcgtataccagtcgcctgttccgcttgctgaaaatgtccggtattaactttgtcgccaacccgctggtcaatattcatctgcaaggacgtttcgatacgtatccaaaacgtcgcggcatcacgcgcgttaaagagatgctggagtccggcattaacgtctgctttggtcacgatgatgtcttcgatccgtggtatccgctgggaacggcgaatatgctgcaagtgctgcatatggggctgcatgtttgccagttgatgggctacgggcagattaacgatggcctgaatttaatcacccaccacagcgcaaggacgttgaatttgcaggattacggcattgccgccggaaacagcgccaacctgattatcctgccggctgaaaatgggtttgatgcgctgcgccgtcaggttccggtacgttatagcgtacgtggcggcaaggtgattgccagcacacaaccggcacaaaccaccgtatatctggagcagccagaagccatcgattacaaacgttgaacgactgggttacagcgagcttagtttatgccggatgcggcgtgaacgccttatccggcctacgtagagcactgaactcgtaggcctgataagcgtagcgcatcaggcaattccagccgctgatctgtgtcagcggctaccgtgattcattcccgccaacaaccgcgcattcctccaacgccatgtgcaaaaatgccttcgcagcggctgtctgccagctgtagtttatgccggatgcggcgtgaacgccttatccggcctacgtagagcactgaactcgtaggcctgataagcgtagcgcatcaggcaattccagccgcagacctgtgtcagcggttaccgactttcatttccgccaacaaccgcgcatttatccaacgccatgtgcaaaaatgccttcgcggcggctgtctgccagctatttttccgccgcaacaaaaccgccgttctctccagtagtggcggggcaagagaaatagctttaagcccgtcatgttgtgtggcaatcgctgctggtaacaatgtggaaagggaagtgcggcgaatcagctccagaaccgcgctaatactgttcgcctcaatgaccacctgtggatgtagccccgctttctcgcagtagtggtcaatttgctctctggtggcaaattccgcgctgagcaggaccagtttttcatcatgcaagcgactcaacgccacctgttcatggacggccagcggatgatgttgcgccacgactaacgctaaactttctgtcagtaaaggaattgcctccagctccgggctatgcacaggcgcgaaggcaatcccaacgtccaactcgtcgcggcaaagcatatcctcgattttctcctggctcatttcctgtagctggagcgtgatgctgggatagcgcgcatagaaatccgccattaaggggccgataaagtagctcgtaaaggtgggggtgacggcgatacgcaggcttcctcgcgtcagatcggcaacatcatgaatcgcccgtttacccgcccccagttcctgtaacgcccggctggcgtactgtcgccagacttctcctgcatcagtgagacgaatcgttcgcccgctacggtcaaacagcggcacgcctaaactctcctctaactggcgaatctgctgggaaagcgcaggttgggagacgtgcaacgcactggcggcacgggtgaagctgccatgttcagccacggcaagaaaataattgatatgtcgagagagcattcgcaacctataagtaaatccaatggaactcatcataaatgagacttttaccttatgacaatcggcgagtagtctgcctctcattccagagacagacagaggttaacggtgaaagagattattgatggattccttaaattccagcgcgaggcatttccgaagcgggaagccttgtttaaacagctggcgacacagcaaagcccgcgcacactttttatctcctgctccgacagccgtctggtccctgagctggtgacgcaacgtgagcctggcgatctgttcgttattcgcaacgcgggcaatatcgtcccttcctacgggccggaacccggtggcgtttctgctagcgtggagtatgccgtcgctgcgcttcgggtatctgacattgtgatttgtggtcattccaactgtggcgcgatgaccgccattgccagctgtcagtgcatggaccatatgcctgccgtctcccactggctgcgttatgccgatagtgcccgcgtcgttaatgaggcgcgcccgcattccgatttaccgagtaaagctgcggcgatggtacgtgaaaacgtcattgctcagttggctaatttgcaaactcatccaagcgtgcgcctggcgctcgaagaggggcggatcgccctgcacggctgggtctacgacattgaaagcggcagcatcgcagcttttgacggcgcaacccgccagtttgtgccactggccgctaatcctcgcgtttgtgccataccgctacgccaaccgaccgcagcgtaaccttatttttaaaccatcaggagttccaccatgattcagagtcaaattaaccgcaatattcgtcttgatcttgccgatgccattttgctcagcaaagctaaaaaagatctcagttttgccgagattgccgacggcaccggtctggcagaagcctttgtaaccgcggctttgctgggtcagcaggcgcttcctgccgacgccgcccgcctggtcggggcgaagctggatctcgacgaagactccattctactgttgcagatgattccactgcgtggctgcattgatgaccgtattccaactgacccaacgatgtatcgtttctatgaaatgttgcaggtgtacggtacaaccctgaaagcgttggttcatgagaaatttggcgatggcattattagcgcgattaacttcaaactcgacgttaagaaagtggcggacccggaaggtggcgaacgtgcggtcatcaccttagatggtaaacatctgccgaccaaaccgttctgacagccatgcgcaaccatcaaaagacgttcacgatgctgctggtactggtgctgattggtcttaatatgcgaccactgctcacctccgtcgggccactgctaccgcaattgcgccaggcgagcggaatgagctttagcgtggctgccctgttgaccgctctgccggtggttaccatgggcgggctggcgctggccggaagctggcttcatcagcatgtcagcgaacgtcgcagtgtcgccatcagtctgttgctgattgccgtcggtgcattgatgcgtgagctttacccgcaaagtgcgctgctgcttagcagcgcactgcttggtggggtggggatcggcatcattcaggcggtgatgcctagcgtgattaaacggcggtttcagcagcgcacgccactggtgatggggctgtggtccgcggctctgatgggcggcggtgggcttggtgccgccataacgccctggttagttcaacatagcgaaacctggtatcaaacactcgcctggtgggcgctgcctgccgttgttgcgctctttgcctggtggtggcaaagcgcccgcgaggtcgcctcttcccacaagacaacaaccactccggttcgcgtggtattcactccccgcgcgtggacgctgggtgtttacttcggtctgattaacggcggttacgccagcctgattgcctggttacccgctttctatattgagattggtgccagcgcgcagtacagcggttccttactggcattgatgacgcttgggcaagccgcaggagctttgctgatgcctgctatggctcgccatcaggatcggcgcaaactgttaatgctggcgctggtgttacaactggtggggttctgcggctttatctggctgccgatgcaattgccggtattgtgggcgatggtgtgtgggttaggtctgggcggcgcgtttccgctctgtttgctgctggcgctcgatcactctgtgcaaccggctattgctggcaagctggtggcgtttatgcagggaatcggttttatcatcgccgggcttgccccgtggttttctggcgtgctgcgtagtatcagcggcaattacctgatggactgggcatttcatgcgctgtgcgtcgttgggctgatgatcataaccctgcgttttgcaccagtacgttttccgcagctgtgggtcaaagaggcatgatgcgacgcttgttcctgcgctttgttcatgccggatgcggctaatgtagatcgctgaacttgtaggcctgataagcgcagcgtatcaggcaatttttataatttaaacactgctttcaactttataatctttgaaataatagtgcttatcccggtcgtttatttcgcgaataacccgacaaggaacgccagccgccacgacgtttggtggaatgtcttttgtgacgatactacccgcgccaataacagaattatccccgatggtgacgcctggattaataaccacatgacttccgatccagacgttattgccaatcgttatcggaaaagagtacatctcgccgttttttctcaattcatggtgtacagggtgtcccgtaacggaaagagtaacgttgggtgcaatcagtacgttatcaccgattgttaccgtgtagtcatcgacaatggttaaattgaaatttgcataaaaattgcggcctatatggatgttggaaccgtaagagaaatagacaggcggttctacccaggcgttttcccctaccgtggcaaacatttctttaatcaggctttctcttttttcaacttcacttggatggctgtgattaaactcatacattaacgttttcccacgaagtcttttttccggtaagccttcgcacatatcggtaaatagcttgcctgctcttattctttcggtcattggcatgttcaatgcgatcactccgttatgatatgttggtcggataaggcgctcgcgccgcatccgacattgattgcttaagcgacttcattcacctgacgacgcagcagggaaagcgggccggggccgctaagcgtgaacacggaaattaaggtgaagcccagcgccaccagacccagcaccagataagcgccctggaaaccgatgctttcatacatattgcccgccagtacagacataaaaatcatcgccagttgcttaaagaagcagaaacagaccagataaatcgtcgcactaaaacgcacttcaaactggctggtaatatatttaaagcagcccaccagcaggaacggtacttcaaacatatgcagcgttttcagaataaccacttccagcgcactggtggcgaagctactgccaataatacgtacagacataatagtgccagccagcagcagggcgtttttcccaccgatgcgattaatgatcagtggcgcaaagaacataatgctggcgttaagtaattcgcccattgtcgttacgtagccaaatacccgcgtaccctgttcaccggtagcaaagaagctagtaaagaaattagcaaactgttggtcaaaaacatcgtaggtgcaggaaacgccaataacatacagactcaaaaaccacagttttggctgtctgaacagttccagtgccagcttaaggctaaatgcgctatggttggcacctaccgcattggcaaccgtggcagaagagggcgcatccgttttggcgaaaaagagtaaaacggcgaggatgagtgcacagccagagcccagccagaaaacaaactgattattgatggtgaacatgatgccgacaatgctggcacacagcgcccagccaacacagccaaacatccgcgcgcgaccaaattcgaaattactgcgacggctgactttctcaataaatgcctctactgctggcgcaccggcgttaaaacaaaagcctagataaataccaccaacaatgcttcctactaaaatgttgtattgtaacagtggcccgaagataaaaataaagaacggcgcaaacatcactaacatgccggtaataatccacagcaggtatttgcgcagcccgagtttgtcagaaagcagaccaaacagcggttggaataataggctgaacagagaaatagcggcaaaaataatacccgtatcacttttgctgatatggttgatgtcatgtagccaaatcgggaaaaacgggaagtaggctcccatgataaaaaagtaaaagaaaaagaataaaccgaacatccaaaagtttgtgttttttaaatagtacataatggatttccttacgcgaaatacgggcagacatggcctgcccggttattattatttttgacaccagaccaactggtaatggtagcgaccggcgctcagctggaattccgcgcttacactcgggctccaggagtcgtcgccaccaatccccatatggaaaccgtcgatattcagccatgtgccttcttccgcgtgcagcagatggcgatggctggtttccatcagttgctgttgactgtagcggctgatgttgaactggaagtcgccgcgccactggtgtgggccataattcaattcgcgcgtcccgcagcgcagaccgttttcgctcgggaagacgtacggggtatacatgtcactcaatggcagatcccagcggtcaaaacaggcggcagtaaggcggtcgggatagttttcttgcggccctaatccgagccagtttacccgctctgctacctgcgccagctggcagttcaggccaatccgcgccggatgcggtgtatcgctcgccacttcaacatcaacggtaatcgccatttgaccactaccatcaatccggtaggttttccggctgataaataaggttttcccctgatgctgccacgcgtgagcggtcgtaatcagcaccgcatcagcaagtgtatctgccgtgcactgcaacaacgctgcttcggcctggtaatggcccgccgccttccagcgttcgacccaggcgttagggtcaatgcgggtcgcttcacttacgccaatgtcgttatccagcggtgcacgggtgaactgatcgcgcagcggcgtcagcagttgttttttatcgccaatccacatctgactaagaaagccactctggcggttaaattgccaacgcttattacccagctcgatgcaaaaatccatttcgctggtggtcagatgcgggatggcgtgggacgcggcggggagcgtcacactgaggttttccgccagacgccactgctgccaggcgctgatgtgcccggcttcactccatgcggtcgcgttcggttgcactacgcgtactgtgagccagagttgcccggcgctctccggctgcggtagttcaggcagttcaatcaactgtttaccttgtggagcgacatccagaggcacttcaccgcttgccagcggcttaccatccagcgccaccatccagtgcaggagctcgttatcgctatgacggaacaggtattcgctggtcacttcgatggtttgcccggataaacggaactggaaaaactgctgctggtgttttgcttccgtcagcgctggatgcggcgtgcggtcggcaaagaccagaccgttcatacagaactggcgatcgttcggcgtatcgccaaaatcaccgccgtaagcgctccacgggttgccgttttcatcatatttaatcaggctctgatccacccagtcccagacgaagccgccctgtaaacggggatactgacgaaacgcctgccagtatttagcgaaaccgccaagactgttacccatcgcgtgggcgtattcgcaaaggatcagcgggcgcgtctctccaggtaggctaagccattttttgatggaccatttcggcacagccgggaagggctggtcttcatccacgcgcgcgtacatcgggcaaataatatcggtggccgtggtgtcggctccgccgccttcatactgcaccgggcgggaaggatcgacagatttgatccagcgatacagcgcgtcgtgattagcgccgtggccactttcattccccaggctccagatgatcacactcgggtgattacgatcgcgctgcaccattcgcgttacgcgttcgctcatcgccggtagccagcgcggatcatcggtcagacgattcattggcaccatgccgtgggtttcaatattggcttcatccaccacatacaggccgtagcggtcgcacagcgtgtaccacagcggatggttcggataatggctacagcgcacggcgttaaagttgttctgcttcatcagcaggatatcctgcaccatcgtctgctcatccatgacctgaccatgcagaggatgatgctcgtgacggttaacgcctcgaatcagcaacggcttgccgttcagcagcagcagaccattttcaatccgcacctcgcggaaaccgacatcgcaggcttctgcttcaatcagcgtgccgtcggcggtgtgcagttcaaccaccgcacgatagagattcgggatttcggcgctccacagtttcgggttttcgacgttcagacgtagtgtgacgcgatcggcataaccaccacgctcatcgataatttcaccgccgaaaggcgcggtgccgctggcgacctgcgtttcaccctgccataaagaaactgttacccgtaggtagtcacgcaactcgccgcacatctgaacttcagcctccagtacagcgcggctgaaatcatcattaaagcgagtggcaacatggaaatcgctgatttgtgtagtcggtttatgcagcaagctgacgtcacggaaaatgccgctcatccgccacatatcctgatcttccagataactgccgtcactccagcgcagcaccatcaccgcgaggcggttttctccggcgcgtaaaaatgcgctcaggtcaaattcagacggcaaacgactgtcctggccgtaaccgacccagcgcccgttgcaccacagatgaaacgcgctgttaacgccatcaaaaataattcgcgtctggccttcctgtagccagctttcatcaacattaaatgtgaggctgtaacaacccgtcggattctccgtgggaacaaacggcggattgaccgtaatgggataggtcacgttggtgtagatgggcgcatcgtaaccgtgcatctgccagttactggggacgacgacagtatcggcctcaggaagatcgcactccagccagctttccggcaccgcttctggtgccggaaaccaggcaaagcgccattcgccattcaggctgcgcaactgttgggaagggcgatcggtgcgggcctcttcgctattacgccagctggcgaaagggggatgtgctgcaaggcgattaagttgggtaacgccagggttttcccagtcacgacgttgtaaaacgacggccagactatccgtaatcatggtcatagctgtttcctgtgtgaaattgttatccgctcacaattccacacaacatacgagccggaagcataaagtgtaaagcctggggtgcctaatgagtgagctaactcacattaattgcgttgcgctcactgcccgctttccagtcgggaaacctgtcgtgccagctgcattaaactatcggccaacgcgcggggagaggcggtttgcgtattgggcgccagggtggtttttcttttcaccagactgacgggcaacagctgattgcccttcaccgcctggccctgagagagttgcagcaagcggtccacgctggtttgccccagcaggcgaaaatcctgtttgatggtggttaacggcgggatataacaactgctgtcttcggtatcgtcgtatcccactacgctgatatccgcaccaacgcgcagcccggactcggtaatggcgcgcattgcgcccagcgccatctgatcgttggcaaccagcatcgcagtgggaacgatgccctcattcagcatttgcatggtttgttgaaaaccggacatggcactccagtcgccttcccgttccgctatcggctgaatttgattgcgagtgagatatttatgccagccagccagacgcagacgcgcgctgacagaacttaatgggcccgctaacagcgcgatttgctggtgacccaatgcgaccagatgctccacgcccagtcgcgtaccgtcttcatgggagaaaataatactgttgatgggtgtctggtcagagacatcaagaaataacgccggaacattagtgcaggcagcttccacagcaatggcatcctggtcatccagcggatagttaatgatcagcccactgacgcgttgcgcgagaagattgtgcaccgccgctttacaggcttcgacgccgcttcgttctaccatgctcaccaccacgctggcacccagttgatcggcgcgagatttaatcgccgcgacaatttggctcggcgcgtgcagggccagactggaggtggcaacgccaatcagcaagctctgtttgcccgccagttgttgtgccacgcggttgggaatgtaattcagctccgccatcgccgcttccactttttcccgcgttttcgcagaaacgtggctggcctggttcaccacgcgggaaacggtctgataagagacaccggcatactctgcgacatcgtataacgttactggtttcacattcaccaccctgaattgactctcttccgggcgctatcatgccataccgcgaaaggttttgcgccattcgatggtgtcaacgtaaatgcatgccgcttcgccttccggccaccagaatagcctggctttcaaccccttcttcgatctgttttgctacccgttgtagcgccggaagatgcttttccgctgcctgttcaatggtcattgcgctcgccatatacaccagattcagacagccaatcacccgttgttcactgcgcagcggtacggcgatagaggcgatcttctcctcctgatcccagccgcggtagttctgtccgtaaccctctttgcgcgcgcgcgccagaatggcttccagctttaacggttcccgtgccagttgatagtcatcaccggggcgggaggctaacatttcgattaattccttgcggtcttgttccgggcaaaaggccagccaggtcaggccgctggcggttttcagaagcggcaaacgtcgcccgaccattgcccggtgaaaggataagcggctgaaacggtgagtggtttcgcgtaccaccattgcatcaacatccagcgtggacacatctgtcggccataccacttcgcgcaacagatcgcccagcagtggggccgccagtgcagaaatccactgttcgtcacgaaatccttcgcttaattgccgcactttgatggtcagtcgaaaactatcatcggaggggctacggcggacatatccctcttcctgcagcgtctccagcagtcgccgcacagtggtgcgatgcaggccgctgagttccgccagcagcccgacgctggcaccgccatcaagtttatttaacatatttaataacattagaccgcgggttaagccgcgcacggttttgtattccgtctgctcattgttctgcatattaatactcatttctatagttaaaacaacgtggtgcacctggtgcacattcgggcatgttttgattgtagcgctaaacacccttcctatactgagcgcacaataaaaaatcatttacatgtttttaacaaaataagttgcgctgtactgtgcgcgcaacgacattttgtccgagtcgtgaggtactgaaatggcaatacaacaccctgacatccagcctgctgttaaccatagcgttcaggtggcgatcgctggtgccggcccggttgggctgatgatggcgaactatctcggccagatgggcattgacgtgctggtggtggagaaactcgataagttgatcgactacccgcgtgcgattggtattgatgacgaggcgctgcgcaccatgcagagcgtcggcctggtcgatgatgttctgccgcacactacgccgtggcacgcgatgcgttttctcaccccgaaaggccgctgttttgctgatattcagccaatgaccgatgaatttggctggccgcgccgtaacgcctttattcagccgcaggtcgatgcggtgatgctggaaggggtgagccgttttccgaatgtgcgctgcttgttttcccgcgagctggaggccttcagtcagcaagatgacgaagtgaccttgcacctgaaaacggcagaagggcagcgggaaatagtcaaagcccagtggctggtagcctgtgacggtggagcaagttttgtccgtcgcactctgaatgtgccgtttgaaggtaaaactgcgccaaatcagtggattgtggtagatatcgccaacgatccgttaagtacgccgcatatctatttgtgttgcgatccggtgcgcccgtatgtttctgccgcgctgcctcatgcggtacgtcgctttgaatttatggtgatgccgggagaaaccgaagagcagctgcgtgagccgcaaaatatgcgcaagctgttaagcaaagtgctgcctaatccggacaatgttgaattgattcgccagcgtgtctacacccacaacgcgcgactggcgcaacgtttccgtattgatcgcgtactgctggcgggcgatgccgcgcacatcatgccggtatggcaggggcagggctataacagtggtatgcgcgacgcctttaacctcgcatggaaactggcgttggttatccaggggaaagcccgcgatgcgctgctcgatacctatcaacaagaacgtcgcgatcacgccaaagcgatgattgacctgtccgtgacggcgggcaacgtgctggctccgccgaaacgctggcagggtacgttacgtgacggcgtttcctggctgttgaattatctgccgccagtaaaacgctacttcctcgaaatgcgcttcaagccgatgccgcaatattacggcggtgcgctgatgcgtgagggcgaagcgaagcactctccggtcggcaagatgtttattcagccgaaagtcacgctggaaaacggcgacgtgacgctgctcgataacgcgatcggcgcgaacttcgcggtaattggctggggatgcaatccactgtgggggatgagcgacgagcaaatccagcagtggcgcgcgttgggcacacgcttcattcaggtggtgccggaagtgcaaattcataccgcacaggataaccacgacggcgtactacgcgtgggcgatacgcaaggtcgcctgcgtagctggttcgcgcaacacaatgctagcctggtggtgatgcgcccggatcgctttgttgccgccaccgccattccgcaaaccctgggcaagaccctgaataaactggcgagcgtgatgacgctgacccgccctgatgccgacgttcctgtcgaaaaggtagcctgatatgcacgcttatcttcactgtctttcccacagcccgctggtggggtatgtcgacccggcgcaagaggtgctcgatgaggtcaatggcgtgattgccagcgcccgcgagcgtattgcggcattctcccctgaactggtggtgctgtttgcgccagatcactacaacggctttttctatgacgtgatgccaccgttctgtttaggcgttggagcgacggcaattggtgatttcggcagtgcggcaggagagctgcccgtgcctgtggagctggcggaggcctgtgcgcatgccgtcatgaagagcgggatcgatcttgccgtttcttactgtatgcaggtggaccacgggttcgcccagccgctggagttcctgctcggtgggctggataaggtgccagttctgcctgtgttcatcaacggtgtcgccacgccgctgcccggtttccagcgtacccgcatgttgggtgaagccattggacgtttcaccagcactctcaataaacgcgtgctgttcctgggttccggtgggctttcccatcagccgccggtgcccgaactggcgaaagccgatgcccatatgcgcgaccgtctgttggggagcgggaaagatttacccgccagtgagcgcgaattgcgtcagcaacgggtgattagcgccgctgagaagtttgttgaggatcagagaacgctgcatccgctcaacccgatttgggataaccagttcatgactttgctggagcagggacgcatacaggaactggatgccgtcagtaacgaagagctttccgccattgccggaaagagcacacatgaaatcaaaacctgggtcgccgcttttgccgctatttctgcgtttggcaactggcgtagcgaagggcgttattaccgcccaatcccggagtggattgccggatttggcagcttaagcgccagaacagagaactgaatatgcaggagaagatgatgagttatcagccacaaaccgaagccgccaccagccgttttctgaatgtagaagaagcgggtaaaacgctgcgcatccattttaatgactgcggacaaggcgacgaaaccgttgtcctgctgcatggttccggcccgggtgctactggctgggcgaacttcagccgcaatatcgatccgctggtagaggcgggctatcgggtgatcctgctggattgtccgggttggggcaagagcgatagcgtcgttaatagtggtagccgaagcgatcttaatgcacgaatcctgaaaagcgtggtggatcaactggatatcgccaaaatccacctgctgggcaacagcatggggggccatagttctgtggcgttcacccttaaatggccggagcgcgtcggcaaactggtgctgatgggcggcggtacgggcggcatgagtttgtttacgccgatgccaaccgaaggtattaagcgactgaatcagctttatcgtcagccgactatcgaaaacctgaagctgatgatggatatcttcgtttttgataccagcgatttgaccgacgccctgtttgaagcgcgcctgaataatatgctgagccgccgcgatcacctggaaaacttcgttaagagcctggaagctaatccgaaacagttcccggattttggcccacgtctggcggaaatcaaagcgcaaaccctgattgtctgggggcgcaacgaccgctttgtgccgatggatgcgggtctgcgtctgctgtccggcattgccggttctgaactgcatatcttccgcgactgtggtcactgggcgcagtgggaacatgccgacgctttcaatcaactggtgctgaatttcctcgcacgcccttaaggaatggtcatgacgaagcatactcttgagcaactggcggcggatttacgccgcgccgcagagcagggcgaagcgattgcaccgctgcgcgatctgattggtatcgataacgctgaagcggcttacgccattcagcacataaatgtgcaacatgacgttgcgcaggggcgtcgcgtggtagggcgtaaagtgggcctgacacatccgaaagtgcaacaacaactgggcgttgatcaaccggattttgggacgttatttgccgacatgtgttatggcgataacgaaatcattcctttttcccgtgttctgcaaccccgcattgaagcggagatcgcactggtgttgaaccgcgatttgcccgcaaccgatatcaccttcgacgaattgtataacgccattgaatgggtacttccggcgctggaagtggtggggagccgcattcgcgactggagcattcagtttgtcgataccgtggcagataacgcctcctgtggggtgtatgtcatcggcggtccggcgcaacgtccggcggggttagacctgaaaaactgcgccatgaagatgacgcgtaataacgaagaggtttctagcgggcgcggcagcgaatgcctgggacatccgcttaatgcggccgtctggctggcacgcaaaatggccagtctgggtgaaccgctgcgcaccggagatatcattcttaccggggcattaggtccgatggtggcggtgaatgcgggcgatcgttttgaagcccatattgaaggcataggtagtgttgctgcgacatttagtagcgcagccccaaaaggaagtctgagttgagctaagccccaaaaggaagtctgtcatgagtaagcgtaaagtcgccattatcggttctggcaacattggtaccgatctgatgattaaaattttgcgtcacggtcagcatctggagatggcggtgatggttggcattgatcctcagtccgacggtctggcgcgcgccagacgtatgggcgtcgccaccacccatgaaggggtgatcggactgatgaacatgcctgaatttgctgatatcgacattgtatttgatgcgaccagcgccggtgctcatgtgaaaaacgatgccgctttacgcgaagcgaagccggatattcgcttaattgacctgacgcctgctgccatcggcccttactgcgtgccggtggttaacctcgaggcgaacgtcgatcaactgaacgtcaacatggtcacctgcggcggccaggccaccattccaatggtggcggcagttagtcgcgtggcgcgtgttcattacgccgaaattatcgcttctatcgccagtaaatctgccggacctggcacgcgtgccaatatcgatgaatttacggaaaccacttcccgagccattgaagtggtgggcggcgcggcaaaagggaaggcgattattgtgcttaacccagcagagccaccgttgatgatgcgtgacacggtgtatgtattgagcgacgaagctagtcaagatgatatcgaagccagtatcaatgaaatggctgaggcggtgcaggcttacgtaccgggttatcgcctgaaacagcgcgtgcagtttgaagttatcccgcaggataaaccggtcaatttaccgggcgtggggcaattctccggactgaaaacagcggtctggctggaagtcgaaggcgcagcgcattatctgcctgcctatgcgggcaacctcgacattatgacttccagtgcgctggcgacagcggaaaaaatggcccagagtctggcgcgcaaggcaggagaagcggcatgaacggtaaaaaactttatatcagcgacgtcacattgcgtgacggtatgcacgccattcgtcatcagtatagcctggaaaacgttcgccagattgccaaagcactggacgatgcccgcgtggatagcattgaagtggcccacggcgacggtttgcaaggttccagctttaactatggtttcggcgcacatagcgaccttgaatggattgaagcggcggcggatgtggtgaagcacgccaaaatcgcgacgttgttgctgccaggaatcggcactattcacgatctgaaaaatgcctggcaggctggcgcgcgggtggttcgtgtggcaacgcactgtaccgaagctgatgtttccgcccagcatattcagtatgcccgcgagctcggaatggacaccgttggttttctgatgatgagccatatgaccacgccggagaatctcgccaagcaggcaaagctgatggaaggctacggtgcgacctgtatttatgtggtggattctggcggtgcgatgaacatgagcgatatccgtgaccgtttccgcgccctgaaagcagagctgaaaccagaaacgcaaactggcatgcacgctcaccataacctgagtcttggcgtggcgaactctatcgcggcggtggaagagggctgcgaccgaatcgacgccagcctcgcgggaatgggcgcgggcgcaggtaacgcaccgctggaagtgtttattgccgccgcggataaactgggctggcagcatgggaccgatctctatgcgttaatggatgccgccgacgacctggtgcgtccgttgcaggatcgaccggtacgagtcgatcgcgaaacgctggcgctgggatacgctggtgtttacagcagcttcctgcgtcactgtgaaacggcggcggcgcgttatggcttaagtgcggtggatattctcgttgagctgggcaaacgccggatggttggcggccaggaggatatgatcgttgacgtggcgctggatctgcgcaacaacaaataatgatgactgccgagaacgtgcattttgtatgcccatcccagcacgactgccggatgcggcgtgaacgccttatccggcctacggatggcgtgagaatttgtaggtctgataagacgcgttagcgtcgcatcaggcatctgcgcacgactgccggatgcggcgtgaacgccttatccggcctacggatggcgcgggaatttgtaggcctgataagacgcgttagcgtcgcatcaggcatctgcgcacgactgccggatgcggcgtgaacgccttatccggcctacgggtggcgcgagaatttgtaggcctgataagacgcgttagcgtcgcatcaggcatctgcgcacgactgccggatgcggcgtaaacgccttatccggcctacggatggcgcgggaatttgtaggcctgataagacgcgttagcgtcgcatcaggcatctgcacacgactgccggatgcgataaacgtcttgtccggcctacatttcgcccgtaggcagtcattaaatagttctgattacgcggctggcaatgtatcagtcgcgattcacctgcactcgcaacgaggttcatcttatgagcactcgtacccctagtagttctagttcccgcctgatgctgaccatcgggctttgttttttggtcgctctgatggaagggctggatcttcaggcggctggcattgcggcgggtggcatcgcccaggctttcgcactcgataaaatgcaaatgggctggatatttagcgccggaatactcggtttgctacccggcgcgttggttggcggaatgctggcggaccgttatggtcgcaagcgcattttgattggcagtgttgcgctgtttggtttgttcagtctggcaacggcgattgcctgggatttccccagtctggtctttgcgcggctgatgaccggtgtcgggctgggggcggcgttgccgaatcttatcgccctgacgtctgaagccgcgggtccacgttttcgtgggacggcagtgagcctgatgtattgcggtgttcccattggcgcggcgctggcggcgacactgggtttcgcgggggcaaacttagcatggcaaacggtgttttgggtaggtggtgtggtgccgttgattctggtgccgctattaatgcgctggctgccggagagcgcggttttcgctggcgaaaaacagtctgcgccaccactgcgtgccttatttgcgccagaaacggcaaccgcgacgctgctgctgtggttgtgttatttcttcactctgctggtggtctacatgttgatcaactggctaccgctacttttggtggagcaaggattccagccaagccaggcggcaggggtgatgtttgccctgcaaatgggggcggcaagcgggacgttaatgttgggcgcattgatggataagctgcgtccagtaaccatgagcctactgatttatagcggcatgttagctagcctgctggcgcttggaacggtgagcagttttaacggtatgttgctggcgggatttgtcgcggggttgtttgcgacaggtgggcaaagcgttttgtatgccctggcaccgttgttttacagtagccagatccgcgcaacaggtgtgggaacagccgtggcggtagggcgtctgggggctatgagcggtccgttactggccgggaaaatgctggcattaggcactggcacggtcggcgtaatggccgcttctgcaccgggtattcttgttgctgggttggcggtgtttattttgatgagccggagaagtcgaatacagccgtgcgccgatgcctgacgtgccttattaggcaggggcgaaagggacttcaccccaatacacctacggcgtttacaggtatactcgctaaaaattattcagcgggtttggaaacaaagatggcaaaacttaccttacaagagcagttgctcaaagcaggattagtcaccagcaaaaaagcggcgaaggtggagagaacggcgaaaaaaagccgcgttcaggcgcgtgaagctcgggcggcggtagaagaaaataaaaaggcacagcttgagcgtgataaacagcttagcgaacagcaaaaacaagcggcgttggcgaaagaatataaagctcaggtgaagcagcttattgaaatgaaccgaatcaccattgccaatggcgatattggttttaacttcactgacggcaatctgattaagaagatttttgtcgataagctcacacaggcgcagttgattaatggtcgtctggcgattgcccgcttgttggtcgataacaatagcgaaggtgaatacgccattattcccgccagcgttgccgataaaattgctcagcgcgatgccagcagtatagcgttgcacagcgcgctcagcgccgaagagcaggatgaagacgacccgtatgccgacttcaaagtgcctgatgatttgatgtggtaaacatagataagtcgtgcgcagatgcctgatgcgacgctatgcgcgtcttatcaggcctacggtttatgggcgaagtgtagaccggataaggcgttcacgccgcatccggcagtcgtgcgccatgcctgatgcgacgctttgcgcgtcttatcaggcctacggcttacgggcgaagtgtaggccggataaggcgttcacgccgcatccggcagtcgtgctattatcaacgcatattcagtttattggcgtggtaggcaatatgctcgccaataaaactggagacaaaataatagctgtgatcataaccctcgtgataacggattaacgtcttgatattcatctcctggcagatcttttcaagatttggagtccgcagctgttctgcgtaaaaatcatcactcaacccctgatcaaccatgatttccgcaacgcgttgaccttgactaataagactcaccgggtcgtaatccaaccaggcatctttattttcagcaagatatgcagcaaaggcttgctgtccccacggcacttggcttggggagacaatggggctaaacgcgctgacgctgacatattcatctgggttacgtaacgccagcaccagcgcgcccagcccgcccatagaatgaccagagatagactttttggccgttgccggaaaatgatgcatcactaaatccggcagctcgttgcggatatagtcatacattttgtaatgttcattccacggcgcttgcgtcgcgttcaggtaaaacccggcaccttgcccgagatcgtaacggtcagcatctgcgacatgactgcctcgcggactggtgtccggcgcaacaacaataatgttgtgctcagccgcgtaacgctgcatcccgcttttagtaatgaaattctgctcgttgcaggtcaggccactaagccagtacagcaccggcaatttttcattcgcggcttttggtgggagatagacgccgacattcatttcacatttcagactttgggaataatgccgatacatattttgccagccgccaaagctgacatgtttttcaatgagttccatcagtcattatctcagggttaatcccccggacggctgcccggggagagtattaagaacccccgcctgaagtggacggggtaaacctgcgggaaatcagtaacgaattacggttcgaatggatttgccttcatgcatcaggtcgaaggcgtcattaatttcatccaggctcatggtatgcgtgacaaacggttccagatcgatatcacctttcatcgcatcttcaaccatgcccggtaactgggaacgacctttcacgccgccaaacgcggaacctttccatacgcgaccagtgaccaactggaatggacgggtggagatttcctgaccggcaaccgcgaccccgatgatcacgctctgaccccagccgcggtgcgcactttccagcgccgcacgcatcacgttgacgttaccgatgcattcaaaggtatggtcgataccccatttgttgatatccaacaggacatcttttatcggtttgtcgtagtcattcgggttaatgcagtcggtagcaccgaagcgacgcgccagatcgaatttcttcgggttggtatcgatagcgataatccgacccgctttcgcctgacgcgcgccctgaaccactgccagaccaatcgcgccaagaccaaacacggcaacagaatcacctggctggactttagctgtgttgtgtaccgcgccaataccggtggtcacgccacagcccagcaggcagacgtgttcatggtttgcttctggattaatttttgccagagacacttccgcgactacggtgtattcactgaatgtagagcaccccatgtagtgataaagcggctgcccgttgtaagaaaaacgggtggtgccgtctggcatcaggcctttaccctgggtttcgcgaaccgcaacacagaggttagttttgccagaacgacagaactcacactcgccgcactccgcggtgtaaagcgggatcacatggtcgccaggtttgacgctggttacgccttcaccgacttcaaccacaacgccggccccttcgtgaccgagaaccaccgggaatacaccttccgggtcatcgccggagagggtaaatgcgtcggtatggcaaacgccggtatgggtgactttaattagcacttcaccttttttcggtggtgcaacgtcaatttcaacgatttccagcggtttaccgggagcaaatgcaacggcagcacgacttttcatctctcgctcttcctcaatatggtaatagattcagttatttaagataggcacgaaccagttcaatagtgtcgtcaacggattggctgacttcgcggctgtagcagtcatttcggtcaaacgtttcccggatatggctttcaagcacttctgccatcagcccattagccgcgccccgaacggcagcgatctgttggagtatggcacggcattcggcatcaccctccaggctccgttccagagcatcaatctgcccccgaatacgacgaactcgagtaaggacctttttcttctcttccggagtactgggcatttcgcacctcatcatctgcatgcaatatactataggggggtattctatatgtcaatgcatacccccctatagtatataacactggagaataaaatttatccggtgaatgtggtcggaaaacaaagaggaaaggggggggctaatcggcagggaaggccgccccggatagcgggcggcagaaggaatcagaatttccaggtcagacgggctgcaagttgcagaccgttacgagatggacggtcccctcgcccccttggggagagggttagggtgagggggcgttcaccgtactttcaacaggttaactccccctttctgagaggaaacaaaattaacgcagaatcttcttctcagccaaatccagcgcaaagtagctgaaaatcagatccgcacccgcacgcttaatgctacctaagctttcgagcacgactttctcttcatctatagcacccgccagcgcggcgaacttaatcatcgcatactcaccgctcacctgatacgcgccaatcggcaattcagtacgttcacgcagctcacgcacgatgtcgaggtacgctccagcaggtttaaccatcaggcagtctgcgccctgggcttcatccagcagactttcacgaatcgcctcacgacggttcattgggttcatctgatagcttttgcggtcgccttttaatgcgcttccggcagcttcacggaacgggccataaaaggaggaggcgaacttggtgctatagctcataatcgccgtatctttaaatcccgcagcgtccagcgcctgacgaatcgcctgtacctggccgtccatcgcggcggaaggggcgatgaagtctgcacctgcagcagctgcaaccacggcttgcttgcctaaattttccagagtcgcgtcgttgtcgacgccatgctcgcacagcacaccgcagtgaccgtgagaagtgtattcacagaagcaggtgtcactcataacgatcatttctggcacggtctgcttgcagatgcggctcatacgcgccaccagtccatcttcccgccaggcatcgctgccggtttcatcggtatggtgagagatgccaaaagtcatcacggaacgaataccggcgttggcgatgcgttcaatttcgcgtgccagatgtttctctggaatgcgcatcacgcctggcatggcttcaacggctttgtagtcgtcaatttcttcttcaacaaagatcggcaacaccaggtcgttaaggctaagtgttgtctcttcaaacatagcgcgcagcgcaggagatttgcgcaggcgacgagggcgttggattaagtctgtcatggtctgcctgatgtttgtggaatcgaggggcatagtatacctgaagcagggtagggatgttttacgaaagttgtcgcgatgttgacaagaagagaatggaagagaggccaggacatctttttaatagaaacagcaataattttatattcactgaaaatatttttaatcttgaatattatcgggcgttaaaatattacattgtggttttcaatgcgttatccgcagcgtgacgctccagcgccagttcaatcaaacgtgtgatcagatcggtgtaacccagaccgctggcttgccacagcttcggatacatactgatattagtgaagccaggcagggtgttgatctcgttgatcaccacttcgttctctggggttaaaaacacgtctacacgcgccatgcctgcgcatcccaacgtttgataagcctgaacggcaatcgcccggatcttatcgttgatttctggcgcaatggctgccggaactaccactttcgcgccatcttcgtcaatgtacttggtgtcgtaggcatagaaatcgctggtgagtacgatctctccacaggtgctggcttgcggattgtcgttgcccagaactgcgcattcgatctcacgacctttgatcccttgctcaacgatcactttatgatcgaactcgaacgccagatcgacggcaattgcgtactgttcttcactggttactttgctgacaccaacagaagagccctgattagccggttttacaaacagtggtaaccccagtttagactccacttcggcaaaactaatgttgtgacgattggcgcgcgtcagggtaataaatggcgcaatgttcagcccggcatcgcgtagcagacgtttggtgacatctttgtccatacaggctgcactagccagaacatcagaacctacaaacggtaaattggcgacccgcagcattccctgcaaggaaccatcttcgcccagcgtaccgtggacaatcgggaaaatgacatccaccgtcggcaacggctgaccgttttgcgcgtcgataagctgatgctcatgtttacctggcacctgcgcaaggctggtcgcgctagggcgcaacgcaatatgggcaggatcgtctgcatttagcagataattgctggcatcgctgacgtgccattgcccttgtttatcaatgcccagcagcacaacgtcgaagcgacttttatcaatggcatcgacaatgttttttgcgctttgcagagacacttcatgttccgcacttttaccaccaaaaacgattcctacccgcagtttttccatcttaaaaacctatcccgtctaacacaaagtgcatacattaccacgacaaaacgggggattcgcggccttctgaaagattgttgcaatcttctgctgacaaagcgtgcaacgtactggtgaagaaagtgcgttatctcaaagatgtgcgcaagatcacaaaaatgatgaacgggaagctaatttattcctggcttaaatggccatgcggtgagtttttttctcttaattataagttaacgaagagaatatatttcataacttttatttataataaaggttgataattaaaagcctatattttgtgtgggtaattatttaaataagagaaacgtttcgctggtaatcaaacaaaaaatatttgcgcaaagtatttcctttgtcataaaaataatacttccagacactatgaagttgtgaaacataatgttaacttctccatactttggataaggaaatacagacatgaaaaatctcattgctgagttgttatttaagcttgcccaaaaagaagaagagagcaaagaactgtgtgcgcaggtagaagctttggagattatcgtcactgcaatgcttcgcaatatggcgcaaaatgaccaacagcggttgattgatcaggtagagggggcgctgtacgaggtaaagcccgatgccagcattcctgacgacgatacggagctgctgcgcgattacgtaaagaagttattgaagcatcctcgtcagtaaaaagttaatcttttcaacagctgtcataaagttgtcacggccgagacttatagtcgctttgtttttattttttaatgtatttgtacatggagaaaataaagtgaaacaaagcactattgcactggcactcttaccgttactgtttacccctgtgacaaaagcccggacaccagaaatgcctgttctggaaaaccgggctgctcagggcgatattactgcacccggcggtgctcgccgtttaacgggtgatcagactgccgctctgcgtgattctcttagcgataaacctgcaaaaaatattattttgctgattggcgatgggatgggggacagcgaaattactgccgcacgtaattatgccgaaggtgcgggcggcttttttaaaggtatagatgccttaccgcttaccgggcaatacactcactatgcgctgaataaaaaaaccggcaaaccggactacgtcaccgacagcgctgcaagtgcaaccgcctggagtaccggtgtcaaaacctataacggcgcgctgggcgtcgatattcacgaaaaagatcacccaacgattctggaaatggcaaaagccgcaggtctggcgaccggtaacgtttctaccgcagagttgcaggatgccacgcccgctgcgctggtggcacatgtgaccagccgcaaatgctacggtccgagcgcgaccagtgaaaaatgtccgggtaacgctctggaaaaaggcggaaaaggaagcattaccgaacagctgcttaacgctcgtgccgacgttacgcttggcggcggcgcaaaaacctttgctgaaacggcaaccgctggtgaatggcagggaaaaacgctgcgtgaacaggcacaggcgcgtggttatcagttggtgagcgatgctgccagtctgaatagcgtgacggaagcgaatcagcaaaaacccctgcttggcctgtttgctgacggcaatatgccagtgcgctggctaggaccgaaagcaacgtaccatggcaatatcgataagcccgcagtcacctgtacgccaaatccgcaacgtaatgacagtgtaccaaccctggcgcagatgaccgacaaagccattgaattgttgagtaaaaatgagaaaggctttttcctgcaagttgaaggtgcgagtatcgataaacaggatcatgctgcgaatccttgtgggcaaattggcgagacggtcgatctcgatgaagccgtacaacgggcgctggaattcgctaaaaaggagggtaacacgctggtcatagtcaccgctgatcacgcccacgccagccagattgttgcgccggataccaaagctccgggcctcacccaggcgctaaataccaaagatggcgcagtgatggtgatgagttacgggaactccgaagaggatagtcaagaacataccggcagtcagttgcgtattgcggcgtatggcccgcatgccgccaatgttgttggactgaccgaccagaccgatctcttctacaccatgaaagccgctctggggctgaaataaaaccgcgcccggcagtgaattttcgctgccgggtggtttttttgctgttagcaaccagacttaatggcagatcacgggcgcatacgctcatggttaaaacatgaagagggatggtgctatgaaaataacattactggttaccttgcttttcggtctggtttttttaaccaccgtcggcgctgccgagagaactttaaccccacaacaacagcgtatgacctcctgtaatcagcaggcgacggcgcaggcgttgaaaggggatgctcgtaagacctacatgagtgattgcctgaagaacagcaagtctgcgcctggcgaaaaaagtttgacgccacagcagcaaaagatgcgcgaatgcaataatcaagcaacacaacaatctctgaaaggtgatgatcgtaataagtttatgagtgcctgcctcaagaaagccgcctgatacctgatagtgctaacgggtgagctacgaaaatggctcacccgaaatatcatacttctgcctttagctccgtctctataatttgggaaaattgtttctgaatgttcccaaaaataatgaatgatgaaaactttttcaaaaaagcggcggcgcacggggaggaacctcctttaactcctcaaaacgaacatcagcggtccgggctgcgcttcgcccgtcgcgtcagactaccccgtgcggttggcctggctggcatgttcttaccgattgctagtacgctggttagtcacccgccgccgggctggtggtggctggtgttggtcggctgggcgttcgtctggccgcatttagcctggcagatagcgagcagggccgtcgatccgcttagccgggaaatttacaacttaaaaaccgatgcagtattagcgggaatgtgggtaggcgtaatgggcgtaaacgtgctgccttccaccgcgatgttgatgattatgtgtctgaatttgatgggggcaggcggcccccgtctgtttgtcgcgggtctggtgttgatggtggtttcctgccttgtcaccctcgagctgacgggcattaccgtgagcttcaatagtgcgccgctggaatggtggctctcccttcccattattgtcatttatcctctgctgtttggctgggtcagctaccagacggcaaccaaactggcggaacataaacgcaggttgcaggtcatgagtacccgcgacggcatgacgggcgtgtataaccgacgtcattgggaaactatgttacgcaatgaatttgataactgtcggcggcataatcgcgatgcaacgttactgattatcgatatcgaccatttcaagagcatcaacgatacctggggccatgatgtgggcgatgaagcgattgtggcgcttacccgacagttacaaattgccctgcgcggtagcgatgtgattggtcggtttggcggcgatgagtttgcagtaatcatgtccggtacgccagctgagagcgccattaccgccatgttacgggtgcatgaagggctaaatacattacgtttgccgaatacgccacaggtaactttacggattagtgtgggggttgcgccgctgaacccacaaatgagtcactatcgtgagtggttgaaaagcgcagatttggcgctttacaaagcaaagaaagccggacgtaaccgcaccgaagtggcggcctgacgtccggcgaaagtcatcaggatttgctgagtttttcacttttttccatacacttcgtcatcgcttcgatcactgcagcacggaagcctttctcttccagtacgcgtaccgcttcaatggtggtgcctcccggactgcagaccatatctttcagtgcccccggatgttctcccgtttccagcaccatttttgcggaacccattaccgcctgagcggcaaatttatacgcctgggcgcgtggcatcccgcccagcacggcggcgtcggccatcgcttcgataaacataaatacgtaggctgggctagaaccgctcacaccgaccaccgggtggatcatcggctcagcaattacttccgcttcgccaaagcagcggaaaatattcagcacatcagcggtatcttctggggttaccagcgcgtttggcgttacggaggtcatcccggcattaaccagtgcgggagtgttcggcatggcgcggataattttccggtcatggcccagcgcgcgggcaagctggtcgagcgtgacacctgcagcaatagaaacgaccagagagtctttattcaggctggaggtgatttcgctaagcactttaatcatgatgccaggtttaacggcagcaaaaatgatgtcggcgatttgcgccacttcttgcgcgctttctgcggcgttgatgccgaactggtcatgcagggcggcgactttatccggggagggggtgtatacccagatttgccctggaagcacctgaccgctggcaatcagaccgccgagaatggcttttcccatattgccgcagccaataaaaccgattttcttttccattgcctcactcctgccgtgaaattcattgttttgataatcgctggcagaagcataaacagaactatgccggaaggcaaaagcgcgacacaatagaggattacccaacaaaggatgactttatgacaatttgggtggatgccgacgcgtgtcccaatgtaattaaagagattttgtatcgcgcggcggaacgtatgcagatgccgctggtactggtagcaaaccagagtttacgcgtgccgccaagccgatttattcgtacgctgcgcgtcgcggcaggtttcgacgttgccgataacgaaattgtccggcagtgtgaagcgggcgatttggtgatcaccgcagatatacctttggctgctgaagccatcgagaaaggcgctgcggcgcttaatccgcgcggcgaacgttacacgccagcgaccattcgtgagcgcctgacgatgcgcgattttatggataccttacgtgccagtgggatccagaccggcggaccagatagccttagtcaacgtgaccgccaggcctttgccgcggagctggagaagtggtggctggaagtgcaacgtagtcgtggctaaatgtaatttattatttacacttcattcttgaatatttattggtatagtaaggggtgtattgagattttcactttaagtggaattttttctttacaatcgaaattgtactagtttgatggtatgatcgctattctcatgacaccggctttcgccgcattgcgacctattggggaaaacccacgatgacacaacctctttttctgatcgggcctcggggctgtggtaaaacaacggtcggaatggcccttgccgatagccttaaccgtcggtttgtcgataccgatcagtggttgcaaagtcagctcaatatgacggtcgcggagatcgtcgaaagggaagagtgggcgggatttcgcgccagagaaacggcggcgctggaagcggtaactgcgccatccaccgttatcgctacaggcggcggcattattctgacggaatttaatcgtcacttcatgcaaaataacgggatcgtggtttatttgtgtgcgccagtaagtgtcctggttaaccgactgcaagctgcaccggaagaagatttacggccaaccttaacgggaaaaccgctgagcgaagaagttcaggaagtgctggaagaacgcgatgcgctatatcgcgaagttgcgcatattatcatcgacgcaacaaacgaacccagccaggtgatttctgaaattcgcagcgccctggcacagacgatcaattgttgattttcgagcgcctatacttaacgttcatcccgtgaaataaggaagaacgatgccaacgaaaccgccttatcctcgtgaagcatatatagtgacgattgaaaaaggaaagccaggacagacggtaacctggtaccaactcagagccgatcatcctaaaccagacagcttgatcagtgaacatccgaccgctcaggaagcgatggatgcgaaaaaacgctatgaggaccctgacaaagagtgaccgcatcagactgctcggaagggattctgagtgccactacaagggatctgcgtcacatttttcataattcatgtttttctaataattagaatattaaacaataacaatccattactggaatcatttggaatctttacattatgccgtgcacgtctgctgctacgctttttgtcatttgtagcacaagtaagtgtcagcagtggtgcttcacacttgcccggtaattaacgacgaaagaaaagtaaggtggatgaacaatgagtgcgagcttggcgatcctgaccatcggcattgtacctatgcaggaagttttgccgctcctgacggaatacattgacgaagataatatttcccatcatagcctgctggggaagttaagtcgtgaagaagtgatggcggagtacgcgccagaagcaggcgaagacaccattctcacattattaaatgacaaccagctggcccatgttagccgtcgcaaagtggagcgtgacctgcaaggtgtggttgaagtgctcgataatcagggttatgacgtcattttattaatgagtacagcaaacattagtagtatgactgcgcgtaatacgatctttcttgagccgagccgaatattgcctccactggtttcctctattgttgaagatcatcaggtgggggttatcgttccggttgaggagatgctgcccgttcaggcgcaaaaatggcaaattttgcagaaaagcccggtatttagtttgggtaaccccattcatgatagtgaacaaaaaatcattgatgccgggaaagaattactggcaaaaggggctgatgtcatcatgctggattgtttaggatttcaccaacgtcatcgcgatttactgcaaaaacagctcgatgttcctgtcttgctgtctaacgtattgattgcacggctggctgcggaattactggtgtaattttgcgtgacagccagcgcctctggcccctatagtgaagtagatgttcaactaccaaacagggccagtttatgcttcaaagtaatgagtacttttccggcaaagtgaaaagtatcggcttttccagcagcagcactggtcgcgccagcgtgggtgttatggttgaaggcgaatacaccttcagcaccgctgagccggaagagatgacggtaatcagtggcgcgctgaatgtgttactgcctgacgcgaccgactggcaggtgtatgaagccggtagcgtgtttaatgttcccggtcacagtgagtttcatctgcaagttgccgaacccacctcttatctgtgccgctatctgtaattcctcgccttccccttgaacgggagggcatttttctgaaatatcctttctttagcccataataatatttcctttgctgcgattttttcaatttccgatatattcataatttatcaaggttgatataaatatcagtgaagatctccagatattgttgcggaactggctacgataaaagataaatcagatgatgaatggtggcgtgcattgctgcaaagtcgcaatgatcatttacgccaaacggcattgcgcaacgcacataccccggcgttgttgttaacgacattgactgagcctcaggatcggagcctggctattaataatccacagctggctgccgatgtgaaaacggcgtggttaaaagaggatccaagtttactcttatttgtcgaacaacccgatcttagcctgttacgtgatttagtgaaaaccggggcaacgcggaaaattcgcagtgaagcgcgtcaccggcttgaggaaaaacaatgacacaacgtccatggagcaagttacagcgtaaaacgcataatattgctgcgctaaaaattattgctcgccgtagcgaataattatatgcctggtgtggcttcgtacgccggataagacgcggcaggcgtcgcatccggcattaaaggaaaatcagcaattaacgttgtgcttcgccacctaatccttcaatcaggttttgaattaacgctgccagttcaccagtcatcaggatgaaatcggcatcaaaacgctgggcgaaatcttcacggtcgatatcttcgttttgatcgcgcagctcgtcgcagaacttcagacgcttgaggctaccatcgtcgcacatcacaaactgaatgcgctgctgccagtcgagcgccagtttagtcaccacttttccggcttcaatgtgattggtgatctcttcgctggtcagatcttgtttcttcgcgcggatcacgccgccatcttccagcaagcttttcagctcggcttcatcaagcagctggaagccctgtgccgcactgccggagcgaacccattcggtcagcgtcagttcaatcgggttttccatgctcaatggtacaaccggtaagctccccaggcttttacgcagtaatgccagcgtatcttccgcttttttggcactggcgcagtccaccataatcaaaccgttaaccgtgtcgatccacatcattgtctggctaaaacggctgaaagcacgcggcagcagagagtgcagcacttcgtctttcaggctatctttttcggttttcttcagcttacgcgcctgttccgcttccagtttggcgattttcgcttccagcgcctgtttaatcaccggagacgggaggattttttcttctttgcgcgcgcagataacaatttgaccattggcaacgtgcgttaacgcatcgctgtggcttcccatcggaggaacccagcccatcttcgccatgtcctggctgccgcatggggtaaatgccatgctggctagctgtttttccatctcttctgcacgcaggctaatctcgcggctaagacggtaaaccattaaatttttgaaccacagcatgataatttccacggccttgtcgttaaatttagcgggcatgataacgaattgtcggcggccttgcattgccaatccggttgtccgtctctacgctattgatattgaaaaaaataaggagagtaccgtgcgtataggtatcgatttaggcggcaccaaaactgaagtgattgcactgggcgatgcaggggagcagttgtaccgccatcgtctgcccacgccgcgtgatgattaccggcagactattgaaacgatcgccacgttggttgatatggcggagcaggcgacggggcagcgcggaacggtaggtatgggcattcctggcagtattagcccttacaccggtgtggtgaagaatgccaatagtacctggctcaacggtcagccattcgataaagacttaagcgcgaggttgcagcgggaagtgcggctggcaaatgacgctaactgtctggcggttagtgaagcagtagatggcgcggcagcgggagcgcagacggtatttgccgtgattatcggcacgggatgcggcgcgggcgtggcattcaatgggcgggcgcatatcggcggcaatggcacggcaggtgagtggggacacaatccgctaccgtggatggacgaagacgaactgcgttatcgcgaggaagtcccttgttattgcggtaaacaaggttgtattgaaacctttattagcggcacgggattcgcgatggattatcgtcgtttgagcggacatgcgctgaaaggcagtgaaattatccgcctggttgaagaaagcgatccggtagcggaactggcattgcgtcgctacgagctgcggctggcaaaaagcctggcacatgtcgtgaatattctcgatccggatgtgattgtcctggggggcgggatgagcaatgtagaccgtttatatcaaacggttgggcagttgattaaacaatttgtcttcggcggcgaatgtgaaacgccggtgcgtaaggcgaagcacggtgattccagcggcgtacgcggcgctgcgtggttatggccacaagagtaaaaaacgtaggcaattggcgcatcatgcctgatgcgacgcttgccgcgtcttatcaggcctacaaaaggtgccagaaccgtaggccggataaggcgttcacgccgcatccggcaataagtgctccgatgcctgatgcgacgcttgccgcgtcttatcaggcctgcaaaatgtgccagaaccgcgtagggcggataaggcgttcacgccgcatccggcaataagtaatgagcaccgagactataacttaccccagtggtttcgccagcaccggagtatccgccgcttgctggcgcttatagcgaccatacagcagcaagctgctcatcgcagcaaagctaagcagggcggcaggcagcgccacgtaattatatgccagccccagcgtcagcatcatacctccgcaatatgcgccgacggcgctaccgaggttaaacgctatttgcccacctgcggcacctaataactctccgcctttggcgttttgtagtaacaatatttgtagcggtgcactaagggcaaataatcccgcgcaacaaataaaagcaaaaataaggctcgttgttttcatgccgccgcagaaaaagagcatcagcagtgccagtacaattataaagtcagttactgctgcaatgcgcagtggactataacgtccactaatcctgccacttagcatatttcccagcaccatccctagcccaactaacatcataataaaggtcatcgccgtttcgctaaaaccggaaataaacatcatgtatggctttacgtagctgaaccaggcaaacacacctgcgttgccaaacatcgtggcggcgaaaattaaccacggggccgggctgcgcaaaaagtgaaattgttcgcgcagatttcctttcgcctcgtcgcgaatatctggcacccaaaaatagacgcttgccatcaccgcaatattaaaaacagcgatcaataaaaaggtgtaacgccagctaaattcctgacttaaatacgttcccagcggaatgcccagcaaattggcgactgtcatcccggaaaccatccccgccacggcggcggtgacttttccgggtttgataattttacttaacacgatcgctccgacgccaaaaaatgcgccatgcggaaagccggataccagccgaccaatggcgagcatcaggtaagagctagagagcgtgaacatggcgttgccaatgacgcacaacgccaccagaaacaacaagatatgtttgagactgtagcggctggaaaagagtgcgatgattggcgcaccgaccaccacccccagtgcataatagctgatcatatgcccggcggcaggaatgctaattcctacgttatgcgccagctccgtgagcacgcccataatgccaaattcggccatccccaaaccaaacgtgcccagagccaaagataaaatgacttttttcataccaccatcacaaccaccagaacggctaccaatcaccgtagccaataaagtgatagcttgcaggataacgaccagcaaggccaagagataattcgcccctctgtattcattatcctgctgaatagttatttcactgcaaacgtactttccagtttgctgtagcccaggccgttgatctttttcactttgatctgcaccggaatacgctctttcatcgcttctacgtggctaatcacaccgatggttttgccactggcgttcagggcatccagcgcatcaagggcggtatccagcgtttcgctatccagcgtgccaaaaccttcatcaaggaacaggctgtcaatacgtgttttatggctgaccagatcgctaagcgccagcgccagcgccagactaacgaggaaactttcgccgccggaaagggtacgggtatcgcgtaccgcatctgcctgccaggtatcaacaacctcgacttccagcgcctcgctggctttgcgctgtaacagatagcgcccgtgcagccgggtaagttgctgattagcgagatggactaaattatccagcgtcagcccctgggcaaacttgcggaatttatcgccctctttggaacctattaggctattcagatatccccagtcctcaacctgctgcgtcatttgagcaatttgctgcattaaggtttgttgttgctgacggttatctgcatcctgcttcagctgctggcgaatctcgccttgactcgtggtgttttcacgcaacttttggtgagtttgcgctaactcttgctgaatctgctccaccgtcacagtgagagccaacccgtcgtcaggtcggtgttgttgatgctgtgccagcgtttctgctgtctgagtgaccagagtttgcgcctgacggcgctggttttccagattctgcttgagctgttccagctgcgttagtgtttgttcatccattagcgccgcaaggaacgcctgctgatcgtcaaagacgctggcctgtagcgcggtgtcaaactgcgcctgggctttttgcagactttgcgccgccagaacatcctgttgctgtaacgtctgctgctggctgtgtaatgcgagacattgttcatgtacctgccgccagttttccaataccacagtttcttcgcagtgcgggagttcatcactttgcggcaacgtttccagaatcggcgtcagctgctgaatacggttttgcagcgcggttaattcgttctggcgttgctgccagctctgcgcttcttgctgacgtgtcgccaaccagctctcttcttcatcttcctgtggcaatgtcagtgcataacccgtcaatgtcgttaaaagtagttgctggcgttgttcaatttgctgttgatactggataatttgctgattatgcgcggcaatctgcccttgtaattcatgccgttggctgagtaaccgcagctggcgttcgtgctcatcttgtgcatccagccacggttgaatatcgtccagtggctgcaaggtgatattgaggctggccgtgacggcttgccattgttgagtaagtgcttgctcatcttgtcggaggctttgcgcttcgttttcatcacgctgaagctgctttgttatggcgtccagttgcccacgtagcgtcgcaccttcttcaccgagctttttaacttcgttttccagcgccagtaatcgagactgattaacgccaggctccagcgcctgatacgcctcgaccgccgggtggctggtggaaccacaaagtgggcaaggctgacccgcctgtaactgtgcacgttgagcttccagcgttttgatgcgcgcttcctgctcgcaaatggttttcacatcggcaagttgctgcgtcttttctttataacgctggcgcatttcgttaagtgcggcgttacgttgcgtctgttcttgcgtgacattctggatagcgacctgtaactgcgccagacgtttttgttggggaacaatctgtccatgcagcgcgaccaggtgctgacgcagtgggcgttgctcagcatgttgcgccagggcggtagcaacttcatcggcggttaacgtcaacgtgatcgccgcaagcgcattaagtttttgctcagcatgggttaactgttgctgccattgccgcagatgctcgcgatcgctggtttgttgggagaactgcgcacgccaacccgccggttcgttgttccactgacggaagcggtcgtgttcctgtaaccaggtattcaggctttgttgctgctgctgtaattctgcactctgcttcgccgcgtggtggcgaatgctcgcgcgaagcgccattgtgctctgtaagcgagtatttacttcttcaatctgctggcgaatatgcgccagcgccgcgctgtgttctgcgatgcgttcccagtgtggacgaagatttcgtgccggttgtgccagactaagcgccgccagttgaggttgcgctttttcttcttcggctaacgcctgttgcaaggcctgctgacggcggctggcttcttgctgcaattcgtcctgacgcgttaaccagtttaggctttgttgttcttgctgctgcgcggtaattaactgtttttcttcgtcagtaagtacctgcaaactcgctgtcaggctttgcacttgttccggcgtgagcaacgtgacgccgctggcctgcgcttgcagcttctccagctctgtgcgggcgcttttgtgctgctcaaaaaccatcgcgctgatttgcccgtagatttcagtgccggttaactcctcgagcaattccgcgcgttctttgggtttggcattcaggaaggcagcaaattgcccctggctaagcagcatgctacgggtgaagcgcccgtaatccagcccggttaacgtcgctgtcagttccagcttatctttcactttgtcggcgagaattttgccgtcggcgcagcgcgccagctctacgcgtggcacctgcaaattaccgtcgggttggttacgcgcccgattctggctccagaatgcacggtacgcttcacctttcacttcaaactccacctccgccagacattcggcggtatcgcgggtcatgagatcattttggctttgactaacgttagagagacgcggagtttcgtgatacagcgccagacaaatggcgtccagcagggtggttttccccgcacctgttgggccggtaatagcaaacagcccgttgctggcgaacggctcgcgggtgaaatcaatcttccattcgccttttaaactgttcaggtttttcaggcgcaggctgagaattttcatgcttcgtgttctccggcgagggtatgcaacgtcgtggtgaaaagatgctgcagacgttgctgctggctttcatccagttcttccagtgccagacggcgattgaacacctcttcgacgctgagttcgctgagggtttcacgctgttggctggctaacacacgctcgcgctgttcacgactccgacgtaccagcaatacttcgacaggcaaactttcggttaatgcctggattttgcgctgaatatcatgcagatactcatcagtagtgatttcgatatccagccagacaggtggctcctggcttacatcgcgccactgttccagctgtgcggtaatgctcgccagatcgcctttcagcactgccatgggttgcgttaccggtacgttcaggttttccacgctctctaatttgccgttactaaatgtcaccagatggacatatttactcttaccgcattcatcaaaactcagtggaatgggggagccgcaatagcgaacatgttccatgccgccaataatctgtgcgcggtgaatatgcccgagcgcgatgtagtcggctggtggaaagttttgtgccggaaacgcgtccagcgtgccaatataaatgtcacgcacggcgtcacttttactggcccccacggtcgttaaatgtcccgtggcgatgatgggcagaggctgatcgccgcgcagtttgcaggcatcggcatagtgttgttggtaataatcggtaatcgctgccagtaaatgctgctgtttttcaataccgttaagccccgcctggctggtaataatgtcacgcggacgtaaaaacggaatggggcacagcactgcgcctggcgtcccgtcgcgacgaggcaagatttgcggcgcatgtccggcgctggcgaccacggtagtattgaggaacgccatgatatcgcggctttcattcagcgtggcgacgctgtcatggtttcctgccagtaccaccagatgacagccagtttgctgtaaattgacaacaaaacggttgtataacgtgcgggcgtaactgggcgggctgccggtatcgaaagcatcaccggcaacaataatcgcatccacctgatgggtttgtgctgtctccagcagccagtcaagaaaagcctgatgttcagcttcgcggcttttactgtagaagttctggccgagatgccagtcactggtgtgaaggatgcgcataacggttccctggcgaaaaagcatgggcgcgattatacccaaacagatgtgccatttgcttttttctgcgccacggaaatcaataacctgaagatatgtgcgacgagcttttcataaatctgtcataaatctgacgcataatgacgtcgcattaatgatcgcaacctatttattacaacagggcaaatcatggcgagacgtattctggtcgtagaagatgaagctccaattcgcgaaatggtctgcttcgtgctcgaacaaaatggctttcagccggtcgaagcggaagattatgacagtgctgtgaatcaactgaatgaaccctggccggatttaattctcctcgactggatgttacctggcggctccggtatccagttcatcaaacacctcaagcgcgagagcatgacccgggatattccagtggtgatgttgaccgccagaggggaagaagaagatcgcgtgcgcggccttgaaaccggcgcggatgactatatcaccaagccgtttagcccgaaggagctggtggcgcgaatcaaagcggtaatgcgccgtattagcccaatggcggtggaagaggtgattgagatgcagggattaagtctcgacccgacatctcaccgagtgatggcgggcgaagagccgctggagatggggccgacagaatttaaactgctgcacttttttatgacgcatcctgagcgcgtgtacagccgcgagcagctgttaaaccacgtctggggaactaacgtgtatgtggaagaccgcacggtcgatgtccacattcgtcgcctgcgtaaagcactggagcccggcgggcatgaccgcatggtgcagaccgtgcgcggtacaggatatcgttttagtacccgcttttaacgccttgctcatcggacgcagagcagggcttatgatttcttaactggagtatcttacgtgctggaacggctgagctggaaaaggctggtgctggagctgctactttgctgcctcccggctttcatcctgggtgcattttttggttacctgccctggtttttgctggcaagcgtaacaggactgcttatctggcatttctggaatttattgcgccttagttggtggctgtgggtggatcgcagtatgaccccgccaccggggcgtggtagctgggaaccgctactatacggcttacaccagatgcagctgcgaaataaaaaacgccgccgtgaactgggcaatctgattaaacgctttcgtagcggcgcggagagcctgcccgacgcggtggtgctgaccacggaagagggcggtattttctggtgtaacggtctggcgcaacaaattcttggtttgcgctggccggaagataacgggcagaacatccttaacctactgcgttacccggagtttacgcaatatctgaaaacgcgtgatttttctcgcccgctcaatctggtgctcaacaccgggcggcatctggaaattcgcgtcatgccttatacccacaaacagttgctgatggtggcgcgtgatgtcacgcaaatgcatcaactggaaggggcgcggcgtaacttttttgccaacgtgagccatgagttacgtacgccattgaccgtgttacagggttacctggagatgatgaatgagcagccgctggaaggcgcggtacgcgaaaaagcgttgcacaccatgcgcgagcagacccagcggatggaaggactggtgaagcaattgctgacgctgagcaaaatagaagccgcaccgacgcatttgctcaatgaaaaggttgatgtgccgatgatgctgcgcgttgttgagcgcgaggctcagactctgagtcagaaaaaacagacatttacctttgagatagataacggcctcaaggtgtctggcaacgaagatcagctacgcagtgcgattagcaacctggtctataacgccgtgaatcatacgccggaaggcacgcatatcaccgtacgctggcagcgagtgccgcacggtgccgaatttagcgttgaagataacggaccgggcattgcaccggagcatattccgcgcctgaccgagcgtttttatcgcgttgataaagcgcgttcccggcaaaccggcggtagcggattagggttagcgatcgtgaaacatgctgtgaatcatcacgaaagtcgcctgaatattgagagtacagtaggaaaaggaacacgtttcagttttgttatcccggaacgtttaattgccaaaaacagcgattaatccgcctttgtcatcttttattgccataagccagtcgatgctggcttattttctttgcagtcaaaatacgggcgttagattttacaacgattggtgattttttgttcgcatgattagccatgtctttttcacggaaatagtgttttatactggttggtgatttcttatcgctatatacctctggtttttagatccctccttgctttaaaacgttataagcgtttaaattgcgcttcaggtgctgtcatactgactgcattaacgcggtaaatcgaaaaactattcttcgccgcgcctggttgggagtatttcccgctaaaattgtttaaatataccgctgtatcatccccagggattggcacaaaaatttaacgttacaacaccacatccacaggcagtatgatttatgacccatcaattaagaagccgcgatatcatcgctctgggctttatgacatttgcgttgttcgtcggcgcaggtaacattattttccctccaatggtcggcttacaggcaggcgaacacgtctggactgcggcattcggcttcctcattactgccgttggcctgccggtattaacggtagtggcgctggcaaaagttggcggcggtgttgacagcctcagcacgccaatcggtaaagtcgctggcgtactgctggcaacggtttgttacctggcggtggggccgcttttcgctacgccgcgtacagctaccgtttcctttgaagtggggattgcgccgctgacgggtgattccgcgctgccgctgtttatctacagcctggtctatttcgctatcgttattctggttagcctctatccgggcaagctgctggataccgtgggcaacttccttgcgccgctgaaaattatcgcgctggtcatcctgtctgttgccgctattgtctggccggcgggttctatcagcacggcgactgaggcttatcaaaacgctgcgttttctaacggcttcgttaacggctatctgaccatggatacgctgggcgcaatggtgtttggtatcgttattgttaacgcggcgcgttctcgtggcgttaccgaagcgcgtctgctgacccgttataccgtctgggctggcctgatggcgggtgttggtctgactctgctgtacctggcgctgttccgtctggggagtgacagcgcgagcctggtcgatcagtctgcaaacggcgctgctattctgcatgcttacgttcagcacacctttggcggcggcggtagcttcctgctggcggcgttaatcttcatcgcctgcctggtaacggcagttggcctgacctgtgcttgtgcagaattctttgcccagtacgtaccgctctcttatcgtacgctggtgtttatcctcggcggcttcagcatggtggtttctaacctcggcttaagccagctgatccagatctccgtaccggtgctgaccgctatttatccgccgtgtatcgcactggttgtattaagttttacacgcagttggtggcataatagctcccgcgtgattgctccgccgatgtttatcagcctgctttttggtattctcgacgggatcaaagcatctgcattcagcgatatcttaccgtcctgggcgcagcgtttaccgctggccgaacaaggtctggcgtggttaatgccaacagtggtgatggtggttctggccattatctgggatcgcgcggcaggtcgtcaggtgacctccagcgctcactaaatcactgaacatttgttttaaccacggggctgcgatgccccgtggttttttattgtgttgatgggttaggaattgatggaaagtaagaacaagctaaagcgtgggctaagtacccgccacatacgctttatggcactgggtagtgcaattggcaccgggctgttttacggtagcgcagacgccatcaaaatggccggtccgagcgtgttgttggcctatattatcggtggtatcgcggcgtatatcattatgcgtgcgctgggggaaatgagcgtacataacccggccgccagctctttcagccgttatgcgcaggaaaacctcggcccgctggcaggttacattaccggctggacctactgctttgaaatccttattgtcgccatcgccgatgtgaccgcttttggtatctatatgggtgtctggttcccgacggtgccgcactggatttgggtactgagcgtggtgctgatcatttgcgccgtaaacctgatgagcgtgaaggtattcggtgagctggaattctggttcagcttctttaaagtcgccaccatcatcatcatgattgtcgccggtttcggcatcatcatctgggggattggcagcggcgggcaaccgaccggtattcataacctgtggagcaacggcggcttcttcagtaacggctggcttggcatggtaatgagcttgcaaatggtgatgtttgcttacggtgggatcgaaattatcgggattaccgccggtgaagcgaaagatcctgagaaaagcataccgcgtgcgattaactccgtgccgatgcgtattctggtgttctacgtcggtacgctgttcgtcattatgtctatctacccgtggaatcaggttggcactgccggtagcccgttcgtgctgacgttccagcatatgggcattacctttgccgccagcattcttaactttgttgtgctgactgctagcctgagcgcaattaacagtgatgtatttggcgtaggccgtatgctccacggtatggcagagcagggcagcgcgccgaaaattttcagcaaaacgagccgtcgcggtattccgtgggttacggtgctggtgatgactaccgcgctgctgtttgcggtgtatctgaactacatcatgccggaaaacgtcttcctggtgatcgctagcctggcaaccttcgccacggtgtgggtgtggattatgatcctgctgagccaaattgccttccgtcgccgtttgccgccagaagaagttaaggcgctgaaatttaaagtgccgggtggggtagcaacgaccatcggcgggctgattttcctgctctttattatcgggttgattggttatcacccggatacgcgtatcagcctgtatgtcggtttcgcgtggattgttgtgctgttgattggctggatgtttaaacgccgccacgatcgtcagctggctgaaaaccagtaatccttgcgttctgtaagccggttcaggaggaaatcctgatccggctattccgaaagttatccgcccccgtcctcctcccccaaatatccttcagatgatgagtgatcctgcattaggctatggcaaggtgatcagattttcatcacaggggaattatgatgttaaatgcatggcacctgccggtgcccccatttgttaaacaaagcaaagatcaactgctcattacactgtggctgacgggcgaagacccaccgcagcgcattatgctgcgtacagaacacgataacgaagaaatgagtgtaccgatgcataagcagcgcagtcagccgcagcctggcgtcaccgcatggcgtgcggcgattgatctctccagcggacaaccccggcggcgttacagtttcaaactgctgtggcacgatcgccagcgttggtttacaccgcagggcttcagccgaatgccgccggcacgactggagcagtttgccgtcgatgtaccggatatcggcccacaatgggctgcggatcagattttttatcagatcttccctgatcgttttgcgcgtagtcttcctcgtgaagctgaacaggatcatgtctattaccatcatgcagccggacaagagatcatcttgcgtgactgggatgaaccggtcacggcgcaggcgggcggaagtacgttctatggcggcgatctggacgggataagcgaaaaactgccgtatctgaaaaagcttggcgtgacagcgctgtatctcaatccggtgtttaaagctcccagcgtacataaatacgataccgaggattatcgccatgtcgatccgcagtttggcggtgatggggcgttgctgcgtttgcgacacaatacgcagcagctgggaatgcggctggtgctggacggcgtgtttaaccacagtggcgattcccatgcctggtttgacaggcataatcgtggcacgggtggtgcttgtcacaaccccgaaagcccctggcgcgactggtacagctttagtgatgatggcacggcgctcgactggcttggctatgccagcttgccgaagctggattatcagagcgaaagtctggtgaatgaaatttatcgcggggaagacagtattgtccgccactggctgaaagcgccgtggaatatggacggctggcggctggatgtggtgcatatgctgggggaggcgggtggggcgcgcaataatatgcagcacgttgccgggatcaccgaagcggcgaaagaaacccagccggaagcgtatattgtcggcgaacattttggcgatgcacggcaatggttacaggccgatgtggaagatgccgccatgaactatcgtggcttcacattcccgttgtggggatttcttgccaataccgatatctcttacgatccgcagcaaattgatgcccaaacctgtatggcctggatggataattaccgcgcagggctttctcatcaacaacaattacgtatgtttaatcagctcgacagccacgatactgcgcgatttaaaacgctgctcggtcgggatattgcgcgcctgccgctggcggtggtctggctgttcacctggcctggtgtaccgtgcatttattacggtgatgaagtaggactggatggcaaaaacgatccgttttgccgtaaaccgttcccctggcaggtggaaaagcaggatacggcgttattcgcgctgtaccagcgaatgattgcgctgcgtaagaaaagtcaggcgctacgtcatggcggctgtcaggtgctgtatgcggaagataacgtggtggtatttgtccgcgtgctgaatcagcaacgtgtactggtggcaatcaaccgtggcgaggcctgtgaagtggtgctacccgcgagtccgtttctcaatgccgtgcaatggcaatgcaaagaagggcatgggcaactgactgacgggattctggctttgcctgccattagcgctacggtatggatgaactaacgttttataacgccttgcgactcgcctgcgccatcatccgcggataaaactgccagaagcgggtttcgagggcgtcataatgagcgtctaaatcgtaccaggagtcacgcagggcatccagacgtgggcggcggcttgccatgccgtttaacacgttctggatgaaatccatatcgcgatagcgcaccagccactgctcactccacaagtaattgttcagattgataaaacgtggcggactgtccggcaaaatcgtcatcacttgctcgcgggcataacagacaaattcctgtagcggaaagtccgggctcagctggctccagtggcgggaaagaaagtgatcccacatgacatccagcgtaataggcgcaacgcggcgcgtttcactacgaaaccactcccgtgcttcgcggacttccggcagattgtcagtcaatacgtcgatacgtcgatgcatatgaatgccagccacgacgtcgggcggaaaactttcttcaggatttccgcgtacgaaatcagccagtaaattgccggaaaggctgctttccgcgagatgggctaaatgcaggtgagctaaaaaattcatcgattatattctatccaaaagggggtaaaggttgcagggagagcgccccggcactagactacccgcctcttattttagtctgagtcagtgtcatgcgcgttaccgatttctcctttgaattgcccgaatccctgattgcccactatcccatgcctgaacgcagtagctgtcgtttactgagcctggacgggccgacgggcgcgctgacgcacggtactttcaccgatttacttgataagctcaaccccggcgatcttctggtttttaataatacccgcgtgatcccggcgcgcctgtttgggcgtaaagccagcggcggcaagattgaagtgctggttgaacggatgctcgacgacaaacgcattcttgcgcatattcgcgccagcaaagcgccaaaacctggcgcagaactgctgctgggcgatgacgaaagtattaacgcaacaatgaccgcgcgccacggcgcactgtttgaagtcgaatttaatgatgaacgcagcgtgctggatattctcaacagcatcggccatatgccgctgccgccgtatatcgaccgtccggacgaagacgctgaccgcgaactttatcaaaccgtttatagcgaaaaaccgggcgcggttgcagccccgaccgcaggtctgcattttgacgagcctttgctggaaaaattgcgcgccaaaggcgtggagatggcgtttgtgacgttgcacgttggtgcgggcaccttccagccggtgcgcgtcgacaccattgaagatcacatcatgcacagcgaatacgctgaagtaccgcaggatgtggtagacgcggtactggcggcgaaagcgcgcggtaaccgggtgattgcggttggcaccactagtgtacgtagcctggaaagcgcggctcaggcagcgaaaaacgatctcattgaaccgttcttcgacgatacccaaatctttatctatccgggcttccagtacaaagtggtcgatgcgctggtgacgaacttccacttgccagagagcacgctgattatgctggttagcgcctttgccggttatcaacacaccatgaacgcctataaagcagcggtagaagagaaatatcgcttttttagttacggtgatgcgatgtttatcacgtacaatccgcaggcaattaatgagcgcgtcggggagtaattccgcggcgctggtttaaaacgttggactgtttttctgacgtagtggagaaaaaatgaaatttgaactggacaccaccgacggtcgcgcacgccgtggccgcctggtctttgatcgtggcgtagtggaaacgccttgttttatgcctgttggcacctacggcaccgtaaaagggatgacgccggaagaagttgaagccactggcgcgcaaattatcctcggcaacaccttccacctgtggctgcgcccgggccaggaaatcatgaaactgcacggcgatctgcacgattttatgcagtggaaggggccgatcctcaccgactccggcggcttccaggtcttcagccttggcgatattcgtaaaatcaccgaacagggcgtgcacttccgtaacccgatcaacggcgatccgattttcctcgatcctgaaaaaagtatggagattcagtacgatcttggtagcgatatcgtcatgatctttgatgagtgtacgccgtatcctgctgactgggattacgcaaaacgctccatggagatgtctctgcgttgggcgaagcgtagccgtgagcgttttgacagtctcggaaacaaaaatgcgctgtttggtatcatccagggcagcgtttacgaagatttacgtgatatttctgttaaaggtctggtagatatcggttttgatggctacgctgtcggcggtctggctgtgggtgagccgaaagcagatatgcaccgcattctggagcatgtatgcccgcaaattccggcagacaaaccgcgttacctgatgggcgttggtaaaccagaagacctggttgaaggcgtacgtcgtggtatcgatatgtttgactgcgtaatgccaacccgcaacgcccgaaatggtcatttgttcgtgaccgatggcgtggtgaaaatccgcaatgcgaagtataagagcgatactggcccactcgatcctgagtgtgattgctacacctgtcgcaattatagtcgcgcttacttgcatcatcttgaccgttgcaacgaaatattaggcgcgcgactcaacaccattcataaccttcgttactaccagcgtttgatggcgggtttacgcaaggctattgaagagggtaaattagagagcttcgtaactgatttttaccagcgtcaggggcgagaagtaccacctttgaacgttgattaatattaataatgagggaaatttaatgagcttttttatttctgatgcggtagcggcaacgggtgcaccggcgcaaggtagcccgatgtctttgattttgatgctggtggtattcggtctgattttctatttcatgatcctgcgtccacagcagaagcgcaccaaagaacacaaaaagctgatggactccattgccaaaggtgatgaagttctgacgaacggtggcctggttggtcgcgtaaccaaagtagcggaaaacggctacattgctatcgcgctgaatgacaccactgaagtagttattaaacgtgacttcgtagctgccgtcctgccgaaaggcaccatgaaggcgctgtaattaaaatttttccctaagggaattgccgtgttaaaccgttatcctttgtggaagtacgtcatgctgatcgtggtgattgtcatcggtctgctgtatgcgcttcccaacctgtttggtgaggatccggctgttcagatcactggtgcgcgcggagtcgccgccagtgagcaaacgctgatccaggtccagaaaacgttacaagaagaaaaaataactgctaagtctgtggcactggaagagggcgctattcttgcgcgcttcgactccactgacacccagttgcgcgctcgtgaagcattaatgggcgttatgggtgacaaatacgtcgtggcgcttaaccttgccccggcaacgccgcgctggctggcagctattcacgctgagccgatgaagctcggccttgacctgcgtggcggcgttcacttcctgatggaagtggatatggacaccgcgcttggcaaactccaggaacaaaatatcgatagcctacgcagtgacctgcgcgaaaagggcatcccgtataccactgttcgtaaagaaaacaactacggcctgagcatcactttccgcgatgctaaagctcgtgatgaagccattgcgtatctgagcaagcgccatccggacctggtgattagcagccagggcagcaaccagctgcgtgcggtaatgagcgatgctcgtctgagtgaagcgcgtgaatatgcggtgcagcagaacattaatatcctgcgtaaccgtgtaaaccaacttggcgtggcggagccggtggttcagcgtcagggtgctgaccgtatcgttgttgaactgccaggtattcaggacactgcgcgtgcgaaagagattctgggtgcgacggcaacgctggaattccgtctggtaaacaccaacgttgaccaggccgctgcggcatccggtcgcgtaccgggcgactctgaagtgaaacagacccgcgaaggtcagccagttgtgctgtacaaacgcgtaattctgaccggtgaccatatcaccgactccacttccagccaggacgaatacaaccaaccgcaggttaacatcagcctcgatagcgctggtggtaacatcatgtctaacttcactaaggacaacatcggcaaaccgatggcaaccctgtttgtggagtacaaagacagcggtaagaaagatgcaaatggtcgtgcggttctggtgaaacaggaagaggtgattaacatcgccaacatccagtctcgtctgggtaacagcttccgtatcaccggcatcaacaacccgaacgaagcccgtcagctgagtctgctgctgcgtgccggtgcgttgatcgcgccgattcagattgttgaagaacgtaccattggcccaaccctgggtatgcagaacattgaacaggggctggaggcttgccttgccggtctgctggtttctattctgttcatgatcatcttctataagaagtttggtctgattgcgaccagtgctctgattgccaacttgatcttaatcgtcggcattatgagcctgttgccaggcgcaacgctgagtatgccaggtatcgcgggtatcgtcttaacccttgcggtggcggtcgatgcgaacgtactgatcaacgaacgtattaaagaagagttgagcaacggacgtactgttcaacaggcaattgatgaaggttatcgtggcgcattcagttctatcttcgatgcgaacatcaccacgctgattaaagtcatcatcctgtacgcagtgggtaccggggcaattaaagggttcgcgattactaccggtatcggtgtggcgacgagcatgtttaccgcgattgtcggtacgcgtgccatcgtaaacctgctatatggcggcaagcgcgtcaagaagctgagtatctgaggagtgcgatgtggcacaggaatatactgttgaacaactaaaccacggccgtaaagtctatgactttatgcgctgggactactgggctttcggcatctctggtctgctgttaatcgctgctatcgttattatgggcgtgcgcggctttaactgggggctggatttcaccggtggtacggttattgaaattacgctcgaaaaaccggctgaaattgacgtaatgcgtgatgcattgcaaaaagccggttttgaagagccgatgctgcaaaactttggtagcagccatgacatcatggtccgtatgccgcctgctgaaggcgaaaccggcggtcaggtgttgggcagccaggttctgaaggtgattaacgaatccaccaatcagaatgcagcagtgaagcgtattgagttcgtcggtccgagcgtgggggcagaccttgcgcaaaccggtgcgatggcgttgatggcagcgctgctgtctatcctcgtgtacgtaggtttccgctttgagtggcgactggcggcaggggtggttattgcgctggcgcacgacgttatcattacgctgggtattttgagcttattccatatcgagattgacctgaccattgtggcaagcttgatgagcgttatcggttacagccttaacgacagtatcgtggtaagcgaccgtattcgtgaaaacttccgcaagatccgtcgcggtacgccttacgaaatctttaacgtgtccttgacccagacgctgcaccgtaccttgatcacatccggtactaccttgatggttatcctgatgctgtacctcttcggtggtccggtactggaaggcttcagcctgaccatgcttatcggtgtttccatcggtactgcatcttccatctatgtggcatctgcgttggctctgaaactgggtatgaagcgcgaacacatgttgcagcagaaagtggaaaaagaaggggcggatcagccgagtattctgccgtaatcaagttcccgttgatgttgaaaatcccggtcagaagatcgggattttttttgatgtatggagattgcgaaaatccccgcatcttgggaaactgcgcgtaaccctacatttcatccaggtaacttttcatggctatcatcccaaaaaactatgcgcggttagaaagcggctatcgcgaaaaagcattaaaaatctatccgtgggtctgcggtcgctgttcccgcgagtttgtttattccaacctgcgtgaacttaccgttcaccacattgatcacgaccataccaataacccggaagatggcagtaactgggaattgttgtgtctctattgccacgatcatgagcatagcaaatataccgaagcggatcagtatggtacgaccgttatcgcaggggaagatgcgcagaaagatgtcggtgaagcgaagtacaacccattcgctgacctgaaagcgatgatgaacaagaagaagtgattaaaacgtaaaattgcctgatgcgctacgcttatcaggcctacgttatttcagcaatatattgaatttacgtgcttttgttggccggacaaagcgtttacgccgcatccggcatgaacaaagcacacgttgttaacaatcagaaatgccgggaataaatcccggcattttcataatcagaagttgtaacctactaccaggtaaccaccccagccggtagagcgaacgttgaagttgccgttgccgaagttcagttctgcatcgtcgttccactgaccaccgtcgtgccagtaacgagctacgacagagtagtgccagtgatcgtagttcagagccagaatatggctggaagcgatagagttattagtacgggtcttaataccgttgattgcgttaccgctgtcatcccctaaatcggaaccccagtcgaagttggtgaagccgatgtagctcagctgaccgccccacagatcggtaatcggcacaaagtatttaattttgaaacggtaaccgtcccactcgttttcgttcgctgcgccatagttctgccactggtatttcgcatagacgttcatggacaggctcatcggcaggccagtgtcgatatcggtacccagacccatgtaccaggtgctctggcgaccatctttattacgacccatgtcgtaaatgtagttgttcgcgaagtaccactctttgaacggaccgaagctaaggtcagtattggtcagcttgtcgatggagaaacgtggttcgatttccataaacagcggagaaccgtggttccagatacctttagcatcggagttaccgccgaagaataccggcgcatccgcataaccatagaagtcgaaccagtcttttttagcgaatgcttcgtactcaaggtaggtatcgttgcggatctgcggtccgaaacgggtgtgatagcttccgacaacgttaacgctctggtgccaccagtcggaaagatactgcggtttgtcgttttcagctgcgttgacagtaaaagagctagagagcgccagtaccgcaccggctgccagtaatgtttttttcatatgtatgccactgtttgaaaatcccttgcgggagtgaaaaaggcgcaaattgcgtttctaaatatttcgtatacagaggagcctattataaaaatcattgctcacaaaaatatgtttcgtttcacagttctatcatttacgtaatcgattgcgttcacgtttacacacattcgggcggggattgtactgactttcgcccttgttgcaaacttttactatcaatccaggtgatgtaagcagagtaacaaaatgacggggaaagatgttgcgggacgcacaaaatcgtcccgaaatacgtttactgcataacaggttgaatgtcgtggatacgtacaaagcctaactgatccacagaaatcccctttaactgtaacggaatatcaacatcgctgggggcgaggacgctggcaggggcattaatcaattgattctgcacattgatttcctgaaagttgtctattgttccctgaatttgcccatattcaacagttccgctgaatgcgggcaagggatcattgctctcaccctgaatacgtagtgtaagggtggtgccatctgcatcaggcgtaatattcaccaggctcatacgtaaagtaccgatctggctttccagtcttgccggtgttttcgctccaggcagaaggtaaaccccactgctggattttgcattcagcctgttttgctgagtgattttgactgtttcttgattgagttgcgtcatctcctggttcagcgtgctgacgctgtgtttcatctgtcgcacttcactttgctgcacacaggcgctaaggctgaacaggcttcccagcaggagcagtcgaaaaacgttagtattcataggtcgtccctttctcgtcgcaattagcctaatggtagagggtaaaagcagcgaaagcatcgatcctttatctcaaaagcgttgcgcctttgttgtatcgtcagttcagggtaaaatagatttccgttaaccacctggtcaggacgccgtatgcattgcccattctgtttcgccgtggacactaaggtaattgactctcgtctcgtgggcgagggtagttccgtacgccgccgtcggcagtgtctggtgtgtaatgaacgtttcaccacctttgaagtggcggagctggttatgccgcgtgttgtaaaaagcaacgacgtgcgtgaaccgtttaatgaagagaaattgcgtagcggaatgctgcgggcgctggaaaaacgtccggtgagttccgatgacgtcgaaatggcaatcaatcatattaaaagccagctgcgcgccaccggtgagcgcgaagtgccgagcaagatgattggcaatctggtgatggagcaattgaaaaagctcgataaagtcgcctatatccgttttgcctctgtctaccgcagtttcgaagatatcaaagaatttggcgaagagatcgcgcgcctggaggactaagccgtgcaggacgagtattacatggcgcgggcgctaaagctggcgcaacgaggacgttttaccacgcatcccaacccgaatgtcgggtgcgtcattgtcaaagatggcgaaattgtcggtgaaggttaccaccaacgtgcgggtgaaccacatgccgaagtacacgcgttgcgtatggcgggtgaaaaagccaaaggtgcgaccgcctatgtcacactcgaaccctgtagccatcatggtcgtacgccaccgtgctgtgacgcactcatcgccgctggcgtagcgcgcgtggttgccagcatgcaagatcctaacccgcaggtcgctgggcgtggactttaccgtctgcaacaggctggcattgacgtcagccacggcctgatgatgagtgaagccgagcaattgaataaaggctttctcaagcggatgcgcaccggctttccttatattcagttaaaacttggcgcaagccttgatggtcgcacggcgatggcgagcggcgaaagccagtggatcactagcccccaggcgcggcgtgatgtacaactactgcgcgcgcaaagtcatgccattttaaccagcagcgccacggtgctggcggatgatcctgccttaacggtgcgttggtctgaactggatgaacaaactcaggcgctctatccgcaacaaaatctccgtcagccgatacgtattgtgattgatagccaaaatcgcgtgacgccggtacatcgcattgtgcagcagcccggcgaaacctggttcgcgcgtacgcaggaagattctcgtgagtggccggaaacggtgcgtaccttgctgattccagagcataaaggtcatctggatctggttgtactgatgatgcaactgggtaaacagcaaattaacagcatctgggtggaagcggggccaacgctcgctggcgcattgctgcaggcgggtttagtcgatgagctgattgtctatatcgcacctaaactattaggcagcgacgcccgcggattatgcacgctgccagggcttgagaaattagccgacgccccccaatttaaattcaaagagatacgtcatgtaggcccggatgtttgcctgcatttagtgggtgcatgatctcccggctcgaaagggaagcagcgcacgaaatattatgctaaaatccgcccccctgcggggccatactcgaacccgaaggaagaaaatgaacattattgaagctaacgttgctaccccggacgctcgcgtcgccatcaccatcgcgcgtttcaacaactttatcaatgacagcctgctggaaggtgcaattgacgcactgaaacgtatcggtcaggtaaaagatgaaaacattaccgttgtttgggtgcctggtgcctatgagctgccgctggcggcgggtgcactggctaaaaccggtaaatacgacgcggtgattgcgctgggtacggttattcgtggtggcactgcccactttgaatatgtcgctggtggtgcaagcaacggcctggcgcatgttgcccaggacagcgaaattccggttgcttttggggttctgaccactgaaagcattgaacaagcgatcgaacgtgctggcaccaaagctggcaacaaaggtgcagaagctgcactgaccgcgcttgaaatgattaatgtattgaaagccatcaaggcctgaaattagtaaggggaaatccgtgaaacctgctgctcgtcgccgcgctcgtgagtgtgccgtccaggcgctctactcctggcagttgtcccagaacgacatcgctgatgttgaataccagttcctggctgaacaggatgtaaaagacgttgacgtcctgtacttccgtgagctgctggccggggtggcgactaataccgcatacctcgacggactgatgaagccatacctgtcccgcctgctggaagaactgggacaggtagaaaaagcagtactgcgcattgcgctgtacgaactgtctaaacgtagcgatgtgccatacaaagtggccattaacgaagcgatcgaactggcgaaaagcttcggcgcagaagacagccataagttcgtcaacggcgtactcgataaagcagcacctgtgattcgccctaacaaaaagtgatatccaggccggtagattcacggaagaccgttccatgatcgccggccttttcttttttacctgctgaggcataacgtatggcatgtggcgagttctccctgattgcccgttattttgaccgtgtaagaagttctcgtcttgatgtcgaactgggcatcggcgacgattgcgcacttctcaatatccccgagaaacagaccctggcgatcagcactgatacgctggtggcgggtaaccatttcctccctgatatcgatcctgctgatctggcttataaagcactggcggtgaacctaagcgatctggcagcgatgggggccgatccggcctggctgacgctggcattaaccttaccggacgtagacgaagcgtggcttgagtccttcagcgacagtttgtttgatcttctcaattattacgatatgcaactcattggcggcgataccacgcgtgggccattaagtatgacgttgggtatccacggctttgttccgatgggacgagccttaacgcgctctggggcgaaaccgggtgactggatctatgtgaccggtacaccgggcgatagcgccgccgggctggcgattttgcaaaaccgtttgcaggttgccgatgctaaagatgcggactacttgatcaaacgtcatctccgtccaagcccgcgtattttacaggggcaggcactgcgcgatctggcaaatagtgccatcgatctctctgacggtttgatttccgatctcgggcatatcgtgaaagccagcgactgcggcgcacgtattgacctggcattgctgccgttttctgatgcgctttctcgccatgttgaaccggaacaggcgctgcgctgggcgctctctggcggtgaagattacgagttgtgtttcactgtgccggaactgaaccgtggcgcgctggatgtggctctcggacacctgggcgtaccgtttacctgtatcgggcaaatgaccgccgatatcgaagggctttgttttattcgtgacggcgaacctgttacattagactggaaaggatatgaccattttgccacgccataaagatgtcgcgaaaagtcgcctgaagatgagtaatccgtggcatctacttgctgtcggattcggaagtggattaagcccgatcgttcctgggacgatgggcagcctggcagcgattccgttctggtatctgatgacctttttgccctggcagctctacagcctggtggtgatgctggggatctgtatcggcgtctatctttgtcatcaaacggcgaaagacatgggtgtgcacgatcatggcagcattgtctgggacgaatttattggtatgtggatcacgctcatggcgctgccgaccaatgactggcagtgggttgccgccgggtttgtgattttccgtattctggatatgtggaagccgtggccgatccgctggtttgatcgcaatgtgcatggcggcatggggatcatgatcgacgatattgtcgccggggtgatttccgcaggcatcctgtattttatcggtcatcactggccgctgggtattctgagctaattgtgcaccgatgcctgatgtgacgcttgtcacgtctcatcaggcctggactcttatttaaatcctacgacaggatgcggtttatacggcgtttccagttcggcaatctgttccggcttcaaagtgatatccaccgcgttcaatagctcatcaagctgttcttcgcggctagttccgataatcggtgcggcaatgcccggtttactcaacaaccaggccagcgcaacttgtgctcgtgtcgcccccagttcttcactgacgcctgttaaccgctctgcgatctgcgcgtcattttcatcgctttctttatagagatttttccccacctcatcagacaccagtcgtgcggtagtttctccccacggacgcgtcagacggccccttgccagcgggctccatggaattaccgccacgccctcctgataacacagtggtagcatctcgcgctcttcttcacgataaatcagattgtagtgatcctgcatactgacaaactgcgcccagccgtgctgtttttggagttccagtgcctgagcaaactggctagcgtgcatactactcgcgccgatataacgcgctttcccggcttttaccacgtcgttgagggcttccagcgtctcttcgatcggcgtgttgtaatcccagcgatgaatttgcaggatatcgacataatccatgccgagacgtcgcaggctgtcgtcgatagagcgcaaaatttgcgcacgggataatccttccggtaaatcaccaacgcgatggaacactttggtcgcaacgaccacgtcttcacgacgggcgaaatcccgcagtgcgcgaccgacgatctcttcgctgctgccgtcagaataactgttggcggtatcaaagaaatttatgccgccttccagtgcacgtttaattatgggacggctgctttcttccggcagtgtccatgcgtgattaccgcgatctggctcgccaaaggtcatacagccgaggcaaagtcgggaaacgcgaaggtcggtttttcctaaggggttgtattgcatgctgccactcctgctatactcgtcatacttcaagttgcatgtgctgcggctgcattcgttcaccccagtcacttacttatgtaagctcctggggcttcactcgtttgccgccttcctgcaactcgaattatttagagtctatgaataatttcttaagcatagcaggagtggagtagggattatgccagccaggccttgattttggcttccataccagcggcatcgaggccgagttcggcgcgcatttcttcctgagttccttgcggaataaagaagtccggcaggccaatgttcagcacgggtactggtttacgatgggccatcagcacttcgttcacgccgctgcctgcgccgcccataatggcgttttcttctacggtgaccagcgcttcatggctggcggccatttccagaattaacgcttcatcaagcggtttcacaaaacgcatatcgaccagcgtggcgttcaggctttcggcgactttcgccgcttctggcatcagcgtaccaaagttaaggatcgccagtttctcgccacgacgcttcacaatgcctttgccaattggtagtttttccagcggcgtcagttccacgccgaccgcgttgccacgcgggtagcgcaccgcactcgggccatcgttatagtgatagccggtatagagcatctggcgacattcgttttcatcgctcggggtcataatgaccatttccggtatgcagcgcaggtaagagagatcaaaagcaccctgatgggtttgaccgtcagcaccaacaatgcccgcgcggtcgatggcgaacaggaccggaagcttttgaatcgccacgtcatgcagcacctgatcataggcgcgttgcaggaaagtggagtaaatcgcgacaatgggtttgtacccaccaatcgccagacccgcagcaaaggtcaccgcgtgttgctcggcaattgccacgtcgaagtagcgatccgggaatttacgactaaactcgaccatgccggaaccttcacgcatcgccggagtaatcgccatcagcttgttgtctttcgctgccgtttcgcacaaccagtcgccaaagattttactatagctcggcaaaccgccgctacttttcggcaaacaaccgctggagggatcaaatttaggcacggcgtggaaagtgatcgggtctttttctgccggttcataaccacgaccttttttggtcatgatatgcaggaactgcgggcctttcaggtcgcgcatgttctttagcgtggtgataagccccagcacatcgtgaccgtccaccgggccgatgtagttaaagcccagctcttcaaacaacgtgccaggcactaccatgcctttaatatgttcttcggtgcgtttgagcagctctttaattggcggcacgccagagaaaacttttttcccgccttcgcgcagactagagtaaagcttaccggaaagcagctgtgccagatggttgttgagcgcgccgacattttcggaaatgctcatttcattgtcgttgagaatcaccagcatatcaggacggatatcgcccgcgtgattcatcgcttcaaacgccatgcctgcggtaatcgcgccatcgccaatgacacagacggtgcggcgatttttgccttctttttcggcagcaaccgcaataccaattccggcactgatggaggtactactatgcccgacgcttaatacgtcatattcgctttcgccgcgccacgggaacgggtgcagaccgcctttctgacggatggtgccgattttgtcgcggcgtccggtcaaaattttatgcggataagcctgatgccccacatcccaaatcaattggtcaaacggggtgttgtagacatagtgcagcgccacggtcagttcgaccgtgcccagcccggaggcgaagtgcccgctggaacggctcacgctgtcgagtaaatagcggcgcagttcgtcgcagagtttcggtaaactctctttcggcaacagtcgtaactcctgggtggagtcgaccagtgccagggtcgggtatttggcaatatcaaaactcatcaggggcctattaatacttattgtttatttattacgctggatgatgtagtccgctagcgcttccagtgcgctggtatcgagactctgttcagccagttgtttcaggctctgacgggcatcgtcgatcagatcccgggctttcttccgggcttgctcaagacccagaagtgcagggtaggtacttttaccaagttgctggtcggcaccctggcgttttcccaacgttgcagtatctcccaccacatccaggatgtcatcctgaacctggaaggcaaggccgatgctctctgcatacttgtcgagtaccggcagagcacgacgtcctttatctccggcgcttaatgcaccaaggcgaacggcggcgcgaatcaatgcgccggttttatgacgatgaatacgctcaagcgcgtccagaggtacgtgtttgccttccgcgtctaaatctaatgcctgaccaccgcacattccggcaataccactggcgctcgccagttcagaaatcatgctaattctgtcgcggtcgctcacttccggcatatcggcatcgcttaaaatgctgaacgccagcgtttgtaaagcgtcgccagcgagaatcgcgtttgcttcgccaaacttcacatggcaggttggcaaaccgcgacgcagatcgtcatcatccattgccggtaaatcatcatgaattaaactgtaagcgtggatacactcaacggcggcagcgggtgcgtccagcgtgtttgtgctaacgccgaacatatgaccggcggcataaaccaggaaaggtcgcaggcgcttaccacctaataatgcgccatactgcatggtttcgaccacgggagtgttctgaaagggcagtggggcgataaaacggctcagcgcctggttggcctgcttaacgcaggcttcgagttgctgcggaaagtccattactcattgtccggtgtaaaaggggttagagaggcgtcttcattgtcagacagcagaatttgtacgcgctgttcggcttgttgtaatttggcctgcccctgacgtgccagctgcacgccgcgttcgaactcgttcagcgcctcttccagcggcaggtcgccactttccagacgggttacaatctgttccagctcgctcagcgccttttcaaagctggcgggcgcctcatttttcttcggcataatgaatgtctgactctcaatatttttcgccccgtcatggtaacggactcagggcaaatagcaaataacgcgcaatggtaaggtgatgtgcacagcaaagcgatgttagtggtatacttccgcgcctggatgcagccgcaggtgtgggctgctgtatttttccctatacaagtcgcttaaggcttgccaacgaaccattgccgccatgaagtttatcattaaattgttcccggaaatcaccatcaaaagccaatctgtgcgcttgcgctttataaaaatccttaccgggaacattcgtaacgttttaaagcactatgatgagacgctcgctgtcgtccgccactgggataacatcgaagttcgcgcaaaagatgaaaaccagcgtctggctattcgcgacgctctgacccgtattccgggtatccaccatattctcgaagtcgaagacgtgccgtttaccgacatgcacgatattttcgagaaagcgttggttcagtatcgcgatcagctggaaggcaaaaccttctgcgtacgcgtgaagcgccgtggcaaacatgattttagcagcattgatgtggaacgttacgtcggcggcggtttaaatcagcatattgaatccgcgcgcgtgaagctgaccaatccggatgtgactgtccatctggaagtggaagacgatcgtctcctgctgattaaaggccgctacgaaggtattggcggtttcccgatcggcacccaggaagatgtgctgagcctcatttccggtggtttcgactccggtgtttccagttatatgttgatgcgtcgcggctgccgcgtgcattactgcttctttaacctcggcggcgcggcgcatgaaattggcgtgcgtcaggtggcgcattatctgtggaaccgctttggcagctcccaccgcgtgcgttttgtcgctattaatttcgaaccggtcgtcggggaaattctcgagaaaatcgacgacggtcagatgggcgttatcctcaaacgtatgatggtgcgtgccgcatctaaagtggctgaacgttacggcgtacaggcgctggtcaccggcgaagcgctcggccaggtgtccagccagacgctgaccaacctgcgcctgattgataacgtctccgacacgctgatcctgcgtccgctgatctcttacgacaaagagcacatcatcaacctggcccgccagattggcaccgaagactttgctcgcacgatgccggaatattgtggtgtgatctccaaaagcccgacggtgaaagcagttaaaagcaagattgaagcggaagaagagaagttcgacttcagcattctcgataaagtggttgaggaagcgaataacgttgatatccgcgaaatcgcccagcagaccgagcaggaagtggtggaagtggaaaccgtcaatggcttcggcccgaacgacgtgatcctcgatatccgttctatcgatgaacaggaagataagccactgaaagtcgaagggattgatgtggtttctctgccgttctataaactgagcaccaaatttggcgatctcgaccagaacaaaacctggctgctgtggtgtgagcgcggggtgatgagccgtctgcaggcgctctatctgcgcgagcagggctttaacaatgtgaaggtatatcgcccgtaatttgtggtttttacgtcgcatctggtcagatgcgacgtttgccgcatccgacattactcgtaataattataaatccctgccgccatcaccagttgacttgccacttcatgggctttttcacgcccaaccaacaggtcgataattttcagaccaaagtcgatagctgtacccggcccctggctggtcagcaattttacccgtgcatcccagacgacgcgcttgtccagccattgttcggcgggaattttgtctttcagcgtcgggaagccggtcatattaccaatcgggaagatatcgtgcggcaccagcacggtggctggcgcggcgcaaatagccgcgacgatacgcccggaacggtggaactgtttaacggtttcaaccagcagagtgctatcgcgaaaacactccgcgcctttaatgccaccaggcagcacgatcacgtcatattcgccatcagccacttcgaccagcggcgcatccgccagcagcttcacgccgcggctgcaggtaatcgccaggttaccatcgctggcgacgctggcagtggtgactttgataccgccgcgaaccagcagatcgatagtggtgacggcttcagtctcttcactaccaggggcgaggcaaaccagtgcgcttgcgctcatattcactctcctttctttttttaattaccaggggcgaggcaaaccagtgccgatgcgctcatattcactctcctttctttttaccatttcaaacaggcgggtgttttccggtacggcaatcccatgcgcgcgggcgcggcgtaagagaaaaccattgatatagtcgatttcagtgtggcgcagcgcgcggatatcctgcaacatgctgctgatattttccgctgtggcatcaatcacctgcatcacgtaatcacgcaaatcttctgcactagtatgatgcccttcgcgttcgatcaccgccgcgacttcttcgcatatctgcataatttcttgcggatgatgacgtaattcaccgttcgggcaattccagatggcagtcagtggattaatcacgcagttgactgccagcttgcgccacagctcggcgcgaatattgttatgccaggcaacgtcaggcaacacggtttgcaaaatatccgccagataactgtaatccccgtcctgttgccgtgccgggccaatatgcgtgataccgtttgccacatgaataatgacattgccgtcgcggcgggctgcatgggtggtggtgcccatcagtaatggctgctgaatgttttgcaactcttcgatggtgcccatgccgttgtgaattaacagtattggcgtagttacaggcagtgtggacgcgaggcttttgacggcatcggaaacctgccatgctttcagcgtcaccaggagcagatcgctggtggcgagaaaatcgggatcgttggcggtcaggctttcgttaaatatgctaccatctgtctcaaccagattcacgctacaataaggttgcggtacgcgcagccagccctgaacttcatgaccctgtttgcaaagtgctgtaagccataattgccctaaggcaccgcatcccaatacggtaattttcattgttcctcctcacccgcaaccactccgggtgttcaataaggctatcccttaattgtgcatgctgttgcgactatgcacaattaagggatacgtcctggtgcaggactgtcggttatttaactttgcgggtattatgcttcgcatcaaaaatgaagggagaggaaaagatgccatctttcgatattgtctctgaagttgatcttcaggaagcacgtaacgcggtcgataacgcgagccgcgaagtggagtcccgttttgacttccgtaacgttgaagccagttttgagctgaacgacgccagcaaaaccatcaaagtgttgagcgagtccgatttccaggtcaatcagttgctggatattctgcgtgccaagctgctgaagcgcggcattgaaggcagtagcctggatgtaccggagaatatcgttcatagcggtaaaacctggtttgtggaagcgaaactgaaacagggcattgagagcgcgacccagaagaaaatcgtcaagatgatcaaagacagcaaactgaaagtgcaggcgcaaattcagggcgatgaaatccgcgtaacgggcaaatctcgtgatgatttgcaggctgtcatggcgatggtacgtggtggcgatctcggtcagccgttccagttcaaaaacttccgcgattaatcgcgactatgtgcgttttgttcatgtcagatgcggcatgaacgcctgattcggcctacaaaggtttgtaattcagaaactttgtaggcctgataagcgtagcgcagcaggcaattcgccgcgttttttatgcctgacgaattgcctgttctatctcaaagcgattcgtcactttgctgtcgattttcacataagcactatgttcttcttctgcaatcaacacttctttgatgccttcagtttctagcaaacgcacttttaacgcctcgtttgcggcaatgttcgccgggatttcaatgcgcaaactgctgacatacggcggttctttcatggtactggcgactgtcagccacactgcggccagcattgcgccagcgagaaataccccctgaccgtcaaacatgccgttaatccagccgcccaggctaccgccaatcgccacgccaagaaactggctggtggagtaaacacccatcgccgtacctttgtaacctgctgggctctctttactgataagactgggcaggagggcttccatcaaattaaacgccacaaagaaaagctgcacgccgaccaccagttgccagaactgcgtttgcgcgttccacaacacaatttccgcaaccacgatcaacccgacgcagaagacaaagacttgcttcattttgcgcttaacttcagcgtagataatgaaaggcacgacgctgccaaaggcgattagcattgtcgccagatagaccttccagtgttcagccgccgggaaccctgcatcagccagttgtccgggcagggcaacaaacgtgctcatcagcaaaatatgcagacacataatgccaaagttgagtttcagcagccgcggttccgccagcactttactgaaactgcctttcaccattccggactcacgattaagtacgtgagtgctactgttgggcacaacccaaatggtcaacgcaatgccggtcgttgccagaatagcgatcatccagaacagcgcgtgcagcccaagtttgtgagtgatgatcgggccaagcaccatcgcaatggcaaaggtaatgccaaagctcacgccgataaacgccatcgctttggtgcggttttgttcgcgcgtgagatcggaaagcagcgccataacggcggcggcaattgctccagagccttgtagcgcccggcccagaataattccccagatggagtcggaaagcgcagcgataacgctaccggcggcaaacaccgccagcccaccgacaattaatggtttgcgaccaatgcggtcggaaagcaggccaaacggaatctgaaaaacggcctgagtcagaccataaataccaatggcaataccgattaatgcttcgctggcaccttgcagagccatgccgtacgtggtcagaaccggcagaaccataaacatgcccagcatgcgcaagctgaatacggtccctaaaccccaggtcgcgcgcctctcacctggcgtcattttataatcgttcattaccacctctgttttaaattcgcgactagtgtaaagcggcaaacgaatggggtaaacatgcggattttttagtaaatatttcgagagggatatgtttctaatgctaagaaaaaaggtgccgtagcacctttttaatagagaggttttgttaccacacagcagccagcagcgtatggctgtccggtaccataaaatcaacggacatcatcacgctgagggcagtgatggcgatgatagagaagccgaacagcttgcgcgcccagattctgtcatcagcaactttataaccgcgcagagccatacctaaccaccagacgctaaccgccgcggcgaccaccagatatttatacccagcgtaaccgccaagagagagcatcagcgtggcaacggcaaaggcgatgatatacagcgtgatgtgattcttcgccacgctaatgccttttaccactggcaataccggaatgtttgccgcctggtaatccttaaagcggaaaatggcgatggcataggagtgaggcatctgccacaggctgaagatagccagcaggatcgctgcgccgctatcgaactcaccggttaccgcacagtagccgatcaccggcggcgcagcgccggagaggctaccaatcaacgtgccgtagacagagtggcgtttcatgtacaggctataaacgccgacataaaccacaaagcccatcacccccagccagcaggccagcggattcgcgccaaaccacagcagcataaagccagcaatacccagcaacgtggcgtacaccaggctgacagcaggagagatcaggcctttcaccagcacccgattcttcgtcctttccatctttctgtcgatatccctgtcgatgtagttgttaaacacacaaccgctcgccacaaccagactcaccccaaccagcgtgtagataaacaggggataatcaatgctgcccttactggccagcaggaatcccccaatcacgctgatcaggttgccaaagatgatgcctggtttcgttacttgcaggtattgcttaaacatcataaccgccgctcttagtgcatcatcatgttgtagttgaggttccacataatccagatggagcctacaaccaggatagcgatgattagcacggtgaagacaaacgccgtcatgttccagccttcatcacttttggtattcatgtgcaggaagcacaccagatgcaccagaacctgtaccactgccattgccaggattgttcccagaattacggccggagaggcagctcctgtcatcaccatccagaacggaatcaccgtcagaatgatgctcaggataaagcctgtcatgtaggtttttacgctgccatgggacgcgccgctgtgatcggtagaatgactcattacatcgcccccatcagataaacaacagtgaacacacagatccaaaccacatccaggaagtgccagaacaggctcaggcacatgatgcgggtacggttagtgctggtcaggccgcgacgggcgatttgcaccatcagcaccgccatccagataagaccagaagtgacgtgcagaccgtgcgtgccgaccagcgcaaagaacgcactcaggaagccgctgcgatccggacccatgccgttaacaatcaggtgatggaattcatagatttccatcccgataaatccggcaccaaacaaccaggtcaacgccagccaggagataacctggcttttgttgtttttgtacatggcgatagccgccatgccgtaggtgatggagctgaacaacagcaagaaagtttcaaccagaacgaacggcagttcgaaaatgtccttacctgtcgggccgcctgcggtgccgttcaccagaacggcataggtagcaaacaagatagagaacagaatgcagtcgctcatcaggtagatccaaaatccgaagattttggttccgcctgcatcgtggtgcccgtgttcgtgcgcgtgggcagtcgcgtgcgtcaaagtatcagttgccatttttcagccctgccttagtaatctcatcgaaatgctggttttccagtttttcgatttctgccaccggcacgtagtaatccacgtcctcgtcgaagcttttcacgatccaggtgatgatcatgcctgcgaagccaacaatcgccagccaccagatatgccagatcatggcgaaaccgaagatggtggagaaagctgcaatgacgatacctgcaccgctgtttttcggcatatgaatttcttcatagtggtcaggctttttatacgcttcgcctttctctttcatttcccagaatgcatcacgttcgtgaacgtgcggcactacggcaaagttatagaacggaggcggggaagaggttgcccactccagcgtacggccaccccacgggtcgccagtcaggtcacggttctggtcgcggtcgcgaatagaaacgtacatctgaataacgaggcagagaatacccagcgcaatcagtactgcaccgctggctgcaatcatcagcatggtgtggaactgcgggtcaatctgctggctcaaacgacgggtcatgcccatgaagcccagcgcatacagtggcataaaggcaacgaagaagccgatgatccagaaccagaacgcgcgtttaccccaggtttcgttcagtttgaaaccgaacgctttaggccaccagtaggtcatccctgcgaagcagccgaagaccacgccgccgatgatcacgttatggaagtgcgcaatcaggaacaggctgttatgcagaacgaagtccgcgcccggtacggccagcagcacgccagtcatcccgcccacgctgaaggtgacgataaaaccgatggtccacagcatcgcagaatggaacacgatgcggccctgatacatggtgaacagccagttgaagatcttcaccccggtcgggatggcgataatcattgtggtgataccaaagaaggcgtttacgttcgcgcccgcacccatcgtaaagaagtggtgcagccaaacgatgaagctcagcacggtgatacaggcggttgcccataccaggctggtataaccaaacagacgtttacggctgaaggttgccgcaatttcggagaacacaccgaaaacaggcaggatcaggatgtaaacttccgggtggccccaggcccaaatcaggttgatgtacatcatcatgttgccacccatatcgttggtaaagaaatgggtgcccagatagcgatccagggtcaacaacgcgacggtaaccgtcagaattgggaaggaagcaataatcagtacgttcgcgcacagacttgcccaggtaaatactggcatcttgaacatggtcatgcccggtgcgcgcatcttcagaatggtaacgaagaagttgataccggtaagcgtcgtacctataccggatagctggagactccatatccagtaatcgacaccgactcccggactgtactctattccgcttagcggtggataggccagccagccggtctgcgcaaattcgcccacgccgagagaaacgttaaccagaatcacaccaacaacggtaaaccagaagcttaagttgttgaggaacgggaacgcaacgtcacgcgcgccgatctgcagcggaaccaccaggttcatcagaccgataacgaaaggcatcgccacgaagaagatcataatcacgccgtgcgcggtaaagatctgatcgtagtggtgaggtggcaggaagcccgcttcgcccgcgctggcaagagcctgctggctacgcatcataatggcgtcagcaaaaccacgcagcaacatcacaatcgccacgatgatatacatgataccgaggcgtttatggtcgacggaggtcagccactctttccacaggtaggtccacttaccgaagtaagtgatcaggccaacgagcgccagacctcccaaaataatgccagcgatcgtaaccatgacgataggttcatggaacgggactgcatcaagacttaattttccgaacatctttattcttcctcaacccctttaatgggcggattccgcgtggctcatgtccatgccttccataccttcgtgtgcgctgtgctcaccttctggctgggtcatgtccatgctcttaccgtgagccataaacttgttaattacatcggcaaacaagtctggtttcacgttggagaaatattccacctggttgtattcgctaggcgcggccagtttttcgaacgcagccatgtcagacatggtgttcgggctctgcttcgcttttgcgacccactggtcgaatgcggcgcgatccggtgttgcaatagctttgaacttcatgccactgaagcccgggccgctgtagctggcggagataccgtcataagtgccgggttcgttggcgatcagatgcaggcgagtctgcataccggccatggcataaatctggctacccagacgcggaatgaagaaggagttcatcacggagttggaggtcactttgaagtacaccggagtgttcgccgggaaagcgatttcattcacggtagcaatgccctgttccgggtagatgaagaaccatttccagtccatggaaaccacttcgatggtaatgggcttctcgtcgtgtgccagcggcttgctaggctcaagagcgtgagtggttttccaggtcagtactgcaaggaagatgatgattaagataggtaccgtccagaccacagcttccactttattggagtgactccagttcgggctgtacttagcatctttattgctcgcacggtacttccaggcgaaaccaacagccatcaagattgcgggaataacgacaatcaacatcaggccaaatgccgtcagtatcagactacgttgctccagaccaatctgtcctttgggatctaacagcgcagaattacagccactgagcaatacagtgcctgcaaataaactcaaccatcccaaacttttattgtatttcctgagtctcatttaacgacctcaattccacgggatctggtggcgtttaaagtgtgtgggcattttacgggaaggttacattactgtaaacatgattaaattcctgttacttggatttggctgccaggtcacatatgttgcaaaacatatcaggttgattttaagaagctgttgcaaaagggcgttataacaaaaggggagtgctgaaggagtctgggcgggcaattggtataaccaatgtgaaataaaacaattatttaacaaataattatcattagagtgacaactgggtgatgagaaaataaagactcattagctgaatcgtgtaagaaaaatagaatttataaatggcgccaataatttccaaacgctaagccgcacaaaagaacaaatattaataagcgatactgatgtttatttagccgtaataattacggcgagtgattactacagctaaataatatttacagattacgtcagatgcgtttttcgtagcgccagataatccagcaaaccaccaagcacgacgccagaaagggcgactaaaaccccgacttccagcagagcaggcaggaaagagaagtgcgtcaaatccagcgcgtccatcgtcaatagcagtaaccacacggccaacaggctgacgcccgccgccagtgtccacatggcaaaggcataacctgccggatatgcggtacgggagataaagttgtcatttactcgtgtatattcaagcgtctggcggcaaaccagcagcaaaataagccctggtacggcagcggcgacggagaatagatagaatgtgctccagccgtgtgcttcaacaaaccaacccgccacggggccgacataaactcgccctacagcagaaagcgcactgagcagggcaaattgagtagcggaaaaactcttattacatagcgtcattaacagcgcgacaaaggcacttgtgcccatcccgccacagaggttttcgaaaaagacggctgcgcccatgctgtagagatgcttatcagtaatgctcagcagccagtaaccggcgttagacgcaccttgtaaaatgccgaaaatcagcagtgcccggaacagactcaggcgctgcatcaaaatcccaccgtacaatgcgccaacaatggtcgctagtaagccaagcgttttgttaaccacgcctacttcacccgcatcaaacccgacgccgcgaatcaaaaacgtggttgtcaggctcatggcgaatgcgtcgcccagcttatacagcacgataagaagcaaaataagccaggcattattgcgaccaaagaaatctcgcagaggtgcaacaaccgcttgttccagcgttttgggcacaggaatggtgtcggttggttctggtgcaagcaacgtcgcgataatacaggggatcaacagtgccgccattaaccagtacatgccctgccagcccagccatttatctgccagccacagggctaggccgccggaaaccagcatccctaaacggtaacccagcacgctgattgccgcgcccgcaccacgttcttctgccggaagcacatcggttttccacgcatcgaagactatatcctgggaagcagagcaaaaagcgatcaccactgccagcgccgccatccagcggagttgggtgcctggttcgagaaaacccatcgccgcaatggcgactaataacaggatttgcgtggcgagcagccaaccgcgccgccgcccaaaaaatggaggcgtgtagcggtccatcagcggactccagaggaatttaaaaacgtaagcctggcctaccagagagaagaaaccaatggttttgagatcgatattctcgaccgtcatccaggcctgtaaggtaccggatgtcagggcgagcggtagcccggaagcaaaacccaggatcagcaatatggcactacgcggctgttgaaaaatacgtaaatattgactggacatgggcgtctacaggcccggcttgcaccgggccagagggcagaaattaacgcgcgttctgcttgatgaattcgtggatgctggtgtcctgagacatatcagcgatggtatcggtcagcacactgttaaccgcatcggcgatatttttgttggaggcctggaacgcaccttcaacgttgtagctggcacgatagtttttggtcattttgttgccattctgcgcggtagcgatgatggcgatatccgctttggtcgcgatgttgtagcgcacgttgccctgggacacgtcagcatacagttggctaacgatgatttgcagattaaccgggccattcggaccaaccatgtaaccacgcgcggtcatctgtttttccagcacttcttgcagcaggaaacgcagatcgcgggaggcggtcagggtaacgatttgattatcgcgggtgacttttgccagcgcctgatcggtacgctgatcggcaccattaatgcttacggtgacgcccatcaggcttggatcctgctgtggcagtgtaatcgtcggggaaacttcaatagttgttggcggttttgcgcatcctgcaagcataaacagagcaactaacgggaagaggatttttttgaacatgttcgggctctcagagactcttaagcgtgtttggtaaaaattcccgccatcataacattgccaacggcgaggggaagtgggtaaggcatgtaaattcatcatgttgacgaaataatcgcccctggtaaaagaaacactgatgcgaggcctgtgtttcaatctttaaatcagtaaacttcatacgcttgacggaaaaaccaggacgaaacctaaatatttgttgttaagctgcaatggaaacggtaaaagcggctagtatttaaagggatggatgacatctcagcgttgtcggaggagatatttcatgatgatacgtgagcggatagaagaaaaattaagggcggcgttccaacccgtattcctcgaagtagtggatgaaagctatcgtcacaatgtcccagccggctctgaaagccattttaaagttgtgctggtcagcgatcgttttacgggtgaacgttttctgaatcgtcatcgaatgatttacagtactttagcggaggaactctctactaccgttcatgcgctggctctgcatacttacactattaaggagtgggaagggttgcaggacaccgtctttgcctctcctccctgtcgtggagcaggaagcatcgcgtaaaaacgcatttgcaactgtcggcgcttttccagtatgttgctaaagattttatgaaaaacggcctgcgggccgttttgttttgtctggattttgcgctttttgcccagcattcagacgaaaattgcccgggaattgtgaaaaaatacgcgacagcgcgcaataaccgttctcgactcataaaagtgatgccgctataatgccgcgtcctatttgaatgctttcgggatgattctggtaacagggaatgtgattgattataagaacatcccggttccgcgaagccaacaacctgtgcttgcggggtaagagttgaccgagcactgtgattttttgaggtaacaagatgcaagttagtgttgaaaccactcaaggccttggccgccgtgtaacgattactatcgctgctgacagcatcgagaccgctgttaaaagcgagctggtcaacgttgcgaaaaaagtacgtattgacggcttccgcaaaggcaaagtgccaatgaatatcgttgctcagcgttatggcgcgtctgtacgccaggacgttctgggtgacctgatgagccgtaacttcattgacgccatcattaaagaaaaaatcaatccggctggcgcaccgacttatgttccgggcgaatacaagctgggtgaagacttcacttactctgtagagtttgaagtttatccggaagttgaactgcagggtctggaagcgatcgaagttgaaaaaccgatcgttgaagtgaccgacgctgacgttgacggcatgctggatactctgcgtaaacagcaggcgacctggaaagaaaaagacggcgctgttgaagcagaagaccgcgtaaccatcgacttcaccggttctgtagacggcgaagagttcgaaggcggtaaagcgtctgatttcgtactggcgatgggccagggtcgtatgatcccgggctttgaagacggtatcaaaggccacaaagctggcgaagagttcaccatcgacgtgaccttcccggaagaataccacgcagaaaacctgaaaggtaaagcagcgaaattcgctatcaacctgaagaaagttgaagagcgtgaactgccggaactgactgcagaattcatcaaacgtttcggcgttgaagatggttccgtagaaggtctgcgcgctgaagtgcgtaaaaacatggagcgcgagctgaagagcgccatccgtaaccgcgttaagtctcaggcgatcgaaggtctggtaaaagctaacgacatcgacgtaccggctgcgctgatcgacagcgaaatcgacgttctgcgtcgccaggctgcacagcgtttcggtggcaacgaaaaacaagctctggaactgccgcgcgaactgttcgaagaacaggctaaacgccgcgtagttgttggcctgctgctgggcgaagttatccgcaccaacgagctgaaagctgacgaagagcgcgtgaaaggcctgatcgaagagatggcttctgcgtacgaagatccgaaagaagttatcgagttctacagcaaaaacaaagaactgatggacaacatgcgcaatgttgccctggaagaacaggctgttgaagctgtactggcgaaagcgaaagtgactgaaaaagaaaccactttcaacgagctgatgaaccagcaggcgtaatttacgcagcataacgcgctaaattcgcacaaaggcccgtcaccgccaggtggtgggcttttttttgtcatgaattttgcatggaaccgtgcgaaaagcctctttcggtgttagcgtaacaacaaaagattgttatgcttgaaatatggtgatgccgtacccataacacagggactagctgataatccgtccataaggttacaatcggtacagcaggttttttcaattttatccaggagacggaaatgagttacagcggcgaacgagataactttgcaccccatatggcgctggtgccgatggtcattgaacagaccagtcgcggtgagcgctcttttgatatctattctcgtctacttaaggaacgcgtcatttttctgactggccaggttgaagaccacatggctaacctgattgtggcgcagatgctgttcctggaagcggaaaacccagaaaaagatatctatctgtacattaactccccaggcggggtgatcactgccgggatgtctatctatgacaccatgcagtttatcaagcctgatgtcagcaccatctgtatgggccaggcggccagcatgggcgctttcttgctgaccgcaggggcaaaaggtaaacgtttttgcctgccgaatagccgcgtgatgattcaccaaccgttgggcggctaccagggccaggcgaccgatatcgaaattcatgcccgtgaaattctgaaagttaaagggcgcatgaatgaacttatggcgcttcatacgggtcaaagtttagaacagattgaacgtgataccgagcgcgatcgcttcctttccgcccctgaagcggtggaatacggtctggtcgatagcattctgacccatcgtaattgatgccagaggcgcaactgtgccgctatacttatccagggcggcacaacgctgtaagcggcttgcgcctgagaatggcatttgcgtcgtcgtgtgcggcacaaagaacaaagaagaggttttgacccatgacagataaacgcaaagatggcagtggcaaattgctgtattgctctttttgcggcaaaagccagcatgaagtgcgcaagctgattgccggtccatccgtgtatatctgcgacgaatgtgttgatttatgtaacgacatcattcgcgaagagattaaagaagttgcaccgcatcgtgaacgcagtgcgctaccgacgccgcatgaaattcgcaaccacctggacgattacgttatcggccaggaacaggcgaaaaaagtgctggcggtcgcggtatacaaccattacaaacgtctgcgcaacggcgataccagcaatggcgtcgagttgggcaaaagtaacattctgctgatcggtccgaccggttccggtaaaacgctgctggctgaaacgctggcgcgcctgctggatgttccgttcaccatggccgacgcgactacactgaccgaagccggttatgtgggtgaagacgttgaaaacatcattcagaagctgttgcagaaatgcgactacgatgtccagaaagcacagcgtggtattgtctacatcgatgaaatcgacaagatttctcgtaagagtgacaacccgtccattacccgagacgtttccggtgaaggcgtacagcaggcactgttgaaactgatcgaaggtacggtagctgctgttccaccgcaaggtgggcgtaaacatccgcagcaggaattcttgcaggttgatacctctaagatcctgtttatttgtggcggtgcgtttgccggtctggataaagtgatttcccaccgtgtagaaaccggctccggcattggttttggcgcgacggtaaaagcgaagtccgacaaagcaagcgaaggcgagctgctggcgcaggttgaaccggaagatctgatcaagtttggtcttatccctgagtttattggtcgtctgccggttgtcgcaacgttgaatgaactgagcgaagaagctctgattcagatcctcaaagagccgaaaaacgccctgaccaagcagtatcaggcgctgtttaatctggaaggcgtggatctggaattccgtgacgaggcgctggatgctatcgctaagaaagcgatggcgcgtaaaaccggtgcccgtggcctgcgttccatcgtagaagccgcactgctcgataccatgtacgatctgccgtccatggaagacgtcgaaaaagtggttatcgacgagagcgtaattgatggtcaaagcaaaccgttgctgatttatggcaagccggaagcgcaacaggcatctggtgaataattaaccattcccatacaattagttaaccaaaaaggggggattttatctcccctttaatttttcctctattctcggcgttgaatgtgggggaaacatccccatatactgacgtacatgttaatagatggcgtgaagcacagtcgtgtcatctgattacctggcggaaattaaactaagagagagctctatgaatcctgagcgttctgaacgcattgaaatccccgtattgccgctgcgcgatgtggtggtttatccgcacatggtcatccccttatttgtcgggcgggaaaaatctatccgttgtctggaagcggcgatggaccatgataaaaaaattatgctggtcgcgcagaaagaagctagtacggatgagccgggtgtaaacgatcttttcaccgtcgggaccgtggcctctatattgcagatgctgaaactgcctgacggcaccgtcaaagtgctggtcgaggggttacagcgcgcgcgtatttctgcgctctctgacaatggcgaacacttttctgcgaaggcggagtatctggagagcccgaccattgatgagcgggaacaggaagtgctggtgcgtactgcaatcagccagttcgaaggctacatcaagctgaacaaaaaaatcccaccagaagtgctgacgagcctgaatagcatcgacgatccggcgcgtctggcggataccattgctgcacatatgccgctgaaactggctgacaaacagtctgttctggagatgtccgacgttaacgaacgtctggaatatctgatggcaatgatggaaagcgaaatcgatctgctgcaggttgagaaacgcattcgcaaccgcgttaaaaagcagatggagaaatcccagcgtgagtactatctgaacgagcaaatgaaagctattcagaaagaactcggtgaaatggacgacgcgccggacgaaaacgaagccctgaagcgcaaaatcgacgcggcgaagatgccgaaagaggcaaaagagaaagcggaagcagagttgcagaagctgaaaatgatgtctccgatgagcgcagaagcgaccgtagtgcgtggttatatcgactggatggtacaggtgccgtggaatgcgcgtagcaaggtcaaaaaagacctgcgtcaggcgcaggaaatccttgataccgaccattatggtctggagcgcgtgaaagatcgaatccttgagtatcttgcggttcaaagccgtgtcaacaaaatcaagggaccgatcctctgcctggtagggccgccgggggtaggtaaaacctctcttggtcagtccattgccaaagccaccgggcgtaaatatgtccgtatggcgctgggcggcgtgcgtgatgaagcggaaatccgtggtcaccgccgtacttacatcggttctatgccgggtaaactgatccagaaaatggcgaaagtgggcgtgaaaaacccgctgttcctgctcgatgagatcgacaaaatgtcttctgacatgcgtggcgatccggcctctgcactgcttgaagtgctggaaccagagcagaacgtagcgttcagcgaccactacctggaagtggattacgatctcagcgacgtgatgtttgtcgcgacgagcaactccatgaacattccggcaccgctgctggatcgtatggaagtgattcgcctctccggttataccgaagatgaaaaactgaacatcgccaaacgtcacctgctgccgaagcagattgaacgtaatgcactgaaaaaaggtgagctgaccgtcgacgatagcgccattatcggcattattcgttactacacccgtgaggcgggcgtgcgtggtctggagcgtgaaatctccaaactgtgtcgcaaagcggttaagcagttactgctcgataagagtttaaaacatatcgaaattaacggcgataacctgcatgactatctcggtgttcagcgtttcgactatggtcgcgcggataacgaaaaccgtgtcggtcaggtaaccggtctggcgtggacggaagtgggcggtgacttgctgaccattgaaaccgcatgtgttccgggtaaaggcaaactgacctataccggtagcctcggcgaagtgatgcaggagtccattcaggcggcgttaacggtggttcgtgcgcgtgcggaaaaactggggatcaaccctgatttttacgaaaaacgtgacatccacgtccacgtaccggaaggtgcgacgccgaaagatggtccgagtgccggtattgctatgtgcaccgcgctggtttcttgcctgaccggtaacccggttcgtgccgatgtggcaatgaccggtgagatcactctgcgtggtcaggtactgccgatcggtggtttgaaagaaaaactcctggcagcgcatcgcggcgggattaaaacagtgctaattccgttcgaaaataaacgcgatctggaagagattcctgacaacgtaattgccgatctggacattcatcctgtgaagcgcattgaggaagttctgactctggcgctgcaaaatgaaccgtctggtatgcaggttgtgactgcaaaataatgacctcgcgcaaaatgcactaataaaaacagggctggcaggctaattcgggcttgccagcctttttttgtctcgctaagttagatggcggatcgggcttgcccttattaaggggtgttgtaaggggatggctggcctgatataactgctgcgcgttcgtaccttgaaggattcaagtgcgatataaattataaagaggaagagaagagtgaataaatctcaattgatcgacaagattgctgcaggggctgatatctctaaagctgcggctggccgtgcgttagatgctattattgcttccgtaactgaatctctgaaagaaggggatgatgtagcactggtaggttttggtacttttgccgttaaagagcgtgctgcccgtactggccgcaacccgcagaccggtaaagagatcaccatcgctgctgctaaagtaccgagcttccgtgcaggtaaagcactgaaagacgcggtaaactaagcgttgtccccagtggggatgtgacgaagttcaagggcgcatctactgatgtgccttttttatttgtattcggtgactttctgcgtcttgtgggctgacaattgcccccgtttcttgtcacaataggcctttgcgcgcatcgatacgttgcgtgaggtacacagtcatctacagcggagtgttgttacaccatgatggacagcttacgcacggctgcaaacagtctcgtgctcaagattattttcggtatcattatcgtgagcttcatattgaccggcgtgagtggttacctgattggcggaggcaataactacgccgcaaaagtgaatgaccaggaaatcagccgtgggcaattcgagaacgccttcaacagcgagcgtaatcgcatgcagcaacagctgggcgatcaatactccgagctggcagcgaacgaaggctatatgaaaaccctgcgtcaacaggtgctgaatcgtctgatcgacgaggcgctgctggatcagtacgcacgtgagctgaaactgggtatcagcgatgagcaggttaaacaggcgattttcgcgaccccagccttccaggttgacggcaaatttgataacagccgctataacggtatcctcaaccagatggggatgaccgccgatcagtacgcccaggcgctgcgtaaccagctcactacccaacagctgattaacggcgttgccggtaccgattttatgctgaaaggtgaaaccgacgagctggcggcactggtcgcgcaacaacgcgtggtgcgtgaggcgactatcgatgttaacgcgctggcggcgaagcagcctgtgaccgaacaggagattgccagctactacgaacaaaacaaaaacaatttcatgacgccggaacaattccgcgtgagttacatcaagctggatgccgcaacgatgcagcaaccggttagcgatgcggatatccagagctactacgaccagcatcaggatcaattcacccagccgcagcgtacccgctacagcatcatccagaccaaaactgaagatgaagcgaaagcggtacttgatgagctgaataaaggcggtgattttgctgcattagccaaagaaaaatctgccgatattatctctgctcgtaacggcggcgatatgggttggttagaagatgccactatcccggacgaactgaaaaatgctggtctgaaagaaaaaggccaactgtctggtgtcatcaaatctagcgtcggtttcctgattgtacgtctggacgacattcagccagcgaaagtgaaaagcttagacgaagtacgtgacgacattgcggcgaaagtgaaacacgaaaaagccctcgatgcgtactacgcgctgcagcagaaagtgagcgatgcggcaagcaacgacaccgagtctctggccggtgcagagcaagctgccggcgttaaagccactcagacgggttggttcagcaaagataacctgccggaagagttgaacttcaagccggttgccgacgctatctttaacggcggtctggtaggtgaaaacggcgcgccgggcatcaactctgacatcatcaccgtagacggcgaccgcgcattcgtgctgcgcatcagcgagcacaaaccggaagcggtgaaaccgttggcagatgttcaggaacaagttaaggcattggttcagcacaacaaagctgaacaacaggcgaaagtggatgctgagaaactgctggttgatttgaaagccggcaaaggtgcggaagctatgcaggctgccggtctgaaatttggcgagccgaaaaccttaagccgttccggtcgtgacccgattagccaggcggcgtttgcactgccactgccagcgaaagacaaaccgagctacggtatggcgaccgatatgcaaggtaatgtggttctgctggcgctggatgaagtgaaacaaggtagtatgccggaagatcagaaaaaagcgatggtgcagggtatcacccagaacaacgcacaaatcgtctttgaagctctgatgagtaacctgcgtaaagaggcgaaaatcaaaattggcgatgcgctggaacagcaataatcctgaagccgcctcgcaaaaaaatgcgttgcagctgtaacaagaaaaggtcgctttcgcggccttttccatttctgaacattgccatttgtttactgttttcactgccgttaaggtgattccactgttaacaaacaaggagaaaacagtatgaaacacggaattaaagcactgctcattaccctgcccctggcctgtgccggaatgtctcatagcgcgctggcggcagcttctgtggcgaaaccgacggcggtagaaaccaaagcggaagctcctgcagcacaaagtaaagcagcagtaccggcgaaagccagtgacgaagaaggcacccgggtcagcattaataatgccagcgcggaagagctagcccgcgcgatgaatggcgttggcctgaagaaagcgcaggcgattgtcagttatcgcgaagagtacggtccgtttaaaactgtggaggatctaaagcaggtgccggggatgggcaatagcctggtggaacgtaatctggcggtattaaccctgtaattaatttgcatagtggcaattttttgccagactgaagaggtcataccagttatgacctctgtacttataacaacaacgtaaggttattgcgctatgcaaacacaaatcaaagttcgtggatatcatctcgacgtttaccagcacgtcaacaacgcccgctaccttgaatttctcgaagaagcccgctgggatgggttggaaaatagcgacagttttcagtggatgacggcccataacatcgccttcgtcgtggtcaatatcaatattaactatcgtcgcccagcggtattaagtgacctgttaactattaccagtcagttgcagcaattaaacggtaaaagcggcatcttaagccaggtcattacactggagccggaagggcaggtggtagcggatgcgcttattacgtttgtttgtattgatcttaaaacgcagaaagcattagctctggaaggggaattgcgcgaaaagctggagcagatggttaagtaaacgttttgtggtgccggatgctcaagccgcatccggcgacacccggaataattacctcaacccggttttctgcttcatcgctgccatcaccgtcggtttatcggccagataatgattcaaaccgttggcgcgtaaattacatgccgcacaatgaccgcaaccgtcgcctttaaagccgttatagcaggtcaacgtttcgttacggactaaatccagtttgccgtaataatctgccagcgcccaggtttccgctttatcaatccacatcagcggcgtttcaaaacgaatatctttcgccatgcccaaactgacggcatggtttagtgctttcacaaactcatcgcggcaatccgggtagccggagaaatccgtttcgcagacgccagtaattacggcttctgcttttacctgatacgcatatattgccgccagcgtcaggaacaaaatattacgccctgggacaaacgtattcgggataccatcggcttcaggttcataatcaggcaccggaatgctgtcacgcgtcaggctactgaccgccagctcgttgagcagggtgacatccagcaccttatgcgcgcgtgcccccagtttcagcgccagttcgcgtgccacgtcgatttctgcgcgatgccgctgaccgtaatcgaacgtcacgcaatggacttcatcatattgttgtaatgcctgcaccagacaggtggtggaatcctgacctccactgaacacaacgacagcacgtttcatagataatcctgcttgaacaataaaagcgttatggtaacgcctgcgattaacccggaccagctattcattggcttggcgcgggaagccaggcttcggtaaattcaaaccagccgcgcggtgtcagtcgcacaccgttcacgccgggaggggcactaatgcgatagtgatagttgaacagcggcgtcagcgtcgcatctgtcattaactggctaaaaaccgctttcagggcattaaatcggttttcttcatcaggcattatttgcacggcatccagtgtgctttgtagatgtgcgtatgctggagcgtcgaaaacatgtggccacagcggatcgcagcgcagccattgctccagagtatattccggtgcttcgccaattaatctgtcgcccatcatgaggtctgcgtgtgcctgtagggtcgtgtcgtcccagttttttgcgttatgaaaaataattgtgagttcacagccttccgctgccagtgtcgcctgtaggcgttctgccatggtatgaagttctatcggtaggtgataaaccagcgtcaaggttttcggtagtttgacttcatccggtacctgccaatgcggaatagtccagcctggcagtaatgcatgactggcggtgatcaggttttctccgacttctaacgtttgtaataaaccggattgatgaataatggagatcacttttcgcgcctgccagagggagagtcggggacttttgcgcaacgtcaaatagcaaaaacctaaactgatgccgctactgacctggctgacccgttgcagctcctccggtttgccgatggtgatttgcacgggatgccgacaactggttcccaaatctttttcgaaaagcggcggagttatccagtactcaaccgctttaagcagcggatgacgtaaatggtaataatcatggctttccaggcgcaccagctctgctgtgaattgtgttaagcgaaaaggacccgtgccgatcagtgggaattgcggatgcgccagatggctgcaatagctcgccagccggtgcgcaagccagtaatcagggcgatgtaaaaagaaggtcagacactgcggatgggtgacttcaatacgcttcacgctaataaataattgatccagtgctggcagttgtaacagcatcaataatcgctggtgtaagtgactggcttttactgcatcgccgttatgccagtgtagggtactacgaagataaaagtcccagcgtaacccgtcagtagaggtttcccagtgatgcgctaaatcgccaatcgggcgctgagtattattatcgaagcgggtcaggccggaaaatatctgcccggcgagatgctgctcggcacggccgggcaaaaagcctggttgtagcggttcgagcgggcgatagtagggaatacgcaacgtgggtgtatcgttttgccattgtccgcccataaacggctgtaacagagtgcgcagctcacctggggccagttgcgccagctccagcacatcttgctgctttccggtttccagtgcctgttccatcatcgcattgcgtaggctttccggcgtgaccagaaagcgtaattgtccgcgctttccgcgtccactctgcgcctgccactccagccatcccgcctcctgtgcctgacgcaacagcgtacgaacatggcgttcgctgcaaaaacagcgttcggccagttcgctgacggtgacggtttgcggctttccggcggaaggttgccacagacgttgatactggttaagacggttgagcaatcgcatataaacccggaacaatattatttaactattcactattacttccgtatatatcaggtgatactcaatcaccattaaccgtgtcacagagtggagaaagaaatggctcgtctggcagcatttgatatggatggcactttattgatgcccgaccatcatttaggtgagaaaaccctctctactttggcgcgactgcgtgaacgcgacattaccctcacttttgccacggggcgtcatgcgctggagatgcagcatattctcggggcgctaagcctggatgcgtatttgattaccggcaacggaacgcgcgtgcattctctggaaggtgaacttttacatcgtgatgatttacctgcggatgtcgcggagctggtgctgtatcagcaatgggatacccgagccagcatgcatatcttcaatgacgacggttggtttaccgggaaagagatccctgcgttgttgcaggcatttgtctatagcggttttcgttatcagataatcgatgtcaaaaaaatgccactcggcagcgtcaccaagatctgcttctgtggcgatcacgacgatcttacacgcttgcagatccagctatacgaagcattaggcgagcgtgcacatttgtgtttttccgccacggattgcctcgaagtgctgccggtgggctgcaataaaggcgctgcattgacggtgctgacccaacatttaggtttaagcttgcgcgattgcatggcctttggtgatgcgatgaacgatcgcgaaatgttagtcagcgtcggtagcggatttattatgggcaatgcgatgccgcaactgcgcgcggagctcccgcatttaccggtgattggacattgccgaaatcaggctgtctctcactatttgacgcactggctggactatccacatctaccttattcccccgaataacgagatcccttccagcaccgggcaattgcccggttttttttgcgttgaatttgtcattttgtgccgtggtgtttaaaccgcacagaataaattgtcgtgatttcacctttaaaataaaattaaaagagaaaaaaattctctgtggaagggctatgttagataaaattgaccgtaagctgctggccttactgcagcaggattgcaccctctctttgcaggcactggctgaagccgttaatctgacaaccaccccttgctggaagcgcctgaaacggctggaggacgacggtatccttatcggcaaagtcgccctgctggatccggaaaaaataggcctcggcctgaccgcttttgtgctgataaaaacgcaacatcacagcagcgaatggtattgccgctttgtcacggtggttaccgaaatgccagaagtgctggggttctggcgcatggctggtgaatacgattatctgatgcgcgtccaggttgccgacatgaaacgctacgacgagttttataagcgtctggtaaacagcgtgccggggctgagcgacgtcacttccagcttcgcgatggaacagattaaatacaccacttctttacccatcgaataaatatccagaatcaggtcaggacacaacgcgtgcgattatttgctcaattaagctggtatttccgtcgggaatggcgtcgctatctcggggctgtcgccttgcttgtcattatcgcgatgctgcaactggttccgccaaaagtggttggtattgttgtcgatggcgtgacagaacaacactttactaccgggcagatcctgatgtggatcgccaccatggtgctgattgccgttgtggtttatctcctgcgttacgtctggcgggtattgctgtttggtgcgtcttatcaactggctgttgaactgcgtgaagattattaccgtcagctaagccggcagcatcctgagttttacctgcgtcatcgcaccggtgacctcatggctcgtgcgaccaatgacgtcgatcgcgtcgtgtttgccgccggagaaggggtgctgacgctggtggatagtctggtgatgggctgcgctgtgttgattatgatgtctacgcaaattagctggcagttgaccttattttccctgttgccgatgccagtgatggcgatcatgattaagcgcaacggcgatgctttgcatgaacgctttaagctggcacaggcggcgttttccagtcttaatgaccgcacccaggaaagcctcaccagtatccgcatgatcaaagcctttggtctggaagatcgccagagcgcgttatttgccgcggatgccgaagataccggcaaaaaaaacatgcgggtggcgcgtattgatgctcgtttcgacccgaccatctatatcgcgattggtatggcgaacttgctggcgattggcggcggtagttggatggtggtgcagggcagtttaacgctgggccagctcaccagttttatgatgtatttaggtctgatgatttggccaatgctggcgctggcatggatgtttaacattgtggaacgtggtagtgctgcgtacagccgtattcgcgcgatgctggcggaagcgccggtggtgaacgatggtagcgaacccgtgccggaagggcgtggcgaactggatgtaaatattcaccagttcacgtatccgcagactgaccatcctgcgctggaaaacgtcaatttcgccctgaaacccggtcagatgctgggtatctgcgggccgactggttccggcaaaagtaccctgttgagcctcattcagcgtcatttcgacgtcagcgagggggatattcgctttcatgatattcctctgacgaagttacaactcgatagctggcgtagccgcctggcggtagttagccagacgccattccttttttctgacactgtggcgaataacatcgcgctgggttgcccgaatgccacccagcaagagattgagcatgtcgcgcggttagccagcgtacatgacgatattttgcgtctaccgcaaggttacgatacagaggtgggcgagcgcggtgtgatgctttccggcgggcaaaaacagcgtatctccattgctcgtgcgttattagtcaacgcggaaatcctcatccttgatgatgcgcttagcgcggtggacggacgcactgagcaccagatcctgcataacctgcgtcagtgggggcagggaagaacggtaatcatcagtgcccatcgcctttctgcactgacggaagccagtgaaattattgtgatgcagcacggacatatcgcccagcgtggcaatcatgatgtgctggcacaacaaagcggctggtatcgcgatatgtatcgctatcaacaactggaggcggcgctcgacgacgctccggaaaatcgcgaggaggccgtcgatgcgtaactaaaaatcgcgaggaggccgtcgatgcgtagttttagccaactgtggccgactctcaagcgcctgttagcgtacggtagcccgtggcgtaaaccgctggggattgcggtcctgatgatgtgggttgcggcggcggcagaagtcagtgggccgctgcttatcagctattttatcgacaatatggtagcgaaaaataacctgccgttgaaagtggttgcagggctggctgcggcgtatgttgggctgcaactgtttgccgccgggctacattacgcgcagagcctgctgtttaatcgggcggcagtaggcgtagtgcaacagttgcgtaccgacgtgatggatgctgcgttacgccagccattaagcgagtttgatacccaacccgtcgggcaggtgatttcccgcgtcactaatgacactgaagtgatccgcgatctctacgttaccgtagtggcaactgtcctgcgcagtgccgcgctggtgggcgcgatgctggtggcgatgttcagcctcgactggcgaatggcactggtggcgataatgattttcccggtggtgctggtggtaatggtgatataccagcgttacagcacgccgattgtccgtcgtgtgcgcgcctatttggcggatatcaacgacggctttaacgaaatcatcaatggcatgagcgttatccagcagtttcgtcagcaggcgcgatttggcgaacgtatgggggaggccagtcgtagtcactatatggcgaggatgcaaaccctgcgcctcgacggttttctgctgcgtccgctgctgagtctgtttagtagcctcattctttgtggcttgttgatgctgtttggcttctccgccagcggcaccattgaagtgggcgtgctgtatgcgtttatcagctatcttgggcgacttaacgaaccattaatcgaactgaccacgcaacaggcgatgctgcaacaggctgttgttgctggtgagcgcgtgtttgaactgatggacggaccgcgccagcaatatggcaatgatgatcgcccgttacagagtggcaccatcgaagtcgataacgtgagttttgcttatcgcgatgacaatctggtgctaaagaacattaatctctctgtgcctagccgcaattttgtggcgctggtcgggcataccggcagtggcaaaagcaccctcgccagtttattgatgggctattacccgctaacggaaggtgagattcgccttgatggtcgtccattaagtagcctaagtcacagcgcgctgcgccagggcgtggcaatggtgcagcaagatccggtggtgctggcggataccttcctcgccaacgtgacgctggggcgggatatctccgaagaacgcgtctggcaggcgctggaaaccgtgcaactggcggagctggcgcgtagcatgagcgacggtatttacacgccgctgggcgagcaggggaataatctcagtgttgggcaaaagcaactgctggcactggcgcgcgtgctggtcgagacgccgcaaatcctgatccttgatgaggcaaccgccagcattgactccggtactgaacaggcgattcaacatgctctggcggcggtgcgtgaacataccacgctggtagtgattgctcaccgcttaagcaccattgttgatgccgacaccattctggtgcttcatcgtgggcaagccgtggagcagggcactcaccagcaactgctggcggcccagggacgctactggcagatgtatcaactgcaacttgcgggcgaagagctggcagccagcgtgcgtgaagaggaaagtttgagcgcctgaatagcgcaatatttcatcgttggtgcaaaaatgtaacgcactgtgcactgtcatagtgcgttttcattttcaaacttcttaacttcctgctctctttctcgtttttcatttctggcacaccgcttgcaataccttcttcgtgtagcagaaccattaccgaattctgaccggaggggatctatgaagctggtgaccgtgataatcaaaccattcaagctggaagacgttcgtgaagcgttatcttccattggtattcagggcctgaccgtcaccgaagtgaaaggtttcgggcgtcagaaagggcatgccgagctgtaccggggggcggaatacagcgtcaatttcctgccaaaagtaaaaattgatgtggcgattgctgatgaccaactcgatgaagtgatcgatatcgtcagtaaggcggcttacaccggaaaaattggcgacggcaaaatcttcgtcgctgaattgcaacgcgtcattcgtattcgtaccggcgaagccgacgaagcggcgctgtaatctctggcacacagcaacaggaacgaaaaatgaagatagcgacgataaaaactgggcttgctagtctggcgatgcttccgggactggtaatggctgcacctgcggtggccgataaagccgacaatgcgtttatgatgatttgtactgcgctggtgctgtttatgactattccggggattgccctgttttacggtgggttgattcgcggcaaaaacgtgctgagcatgctgacgcaggtgacggtgacatttgcactggtctgtattctctgggtggtttacggttacagcctggcgtttggtgagggcaacaacttcttcggcaacattaactggttgatgctgaaaaacatcgaactgacggcggtgatgggcagcatttatcagtatatccacgtggcgtttcagggaagctttgcctgcattaccgtcggcttgatagttggggcgctggcggaacgaatccgcttcagtgctgtgttgattttcgtggtggtatggctgacgctctcttacattccgattgcgcatatggtgtggggcggtggtttgctggcttctcacggtgcgctggatttcgcgggtggcaccgtggtgcacattaacgccgcaatcgccggtctggtgggcgcgtatctgataggaaaacgcgtgggcttcggtaaagaggcgtttaaaccgcacaacctgccgatggtcttcaccgggactgccattctctatatcggttggtttggctttaacgccgggagtgcgggcacggcgaatgaaatcgcggcactggcatttgtgaatactgtggtcgcaacggcggcggcaattcttggctggatcttcggtgaatgggcgctgcgtggtaagcctagtctgctgggggcgtgttctggcgcgattgccggtctggtcggcgtgacgccagcctgcggctacattggggttggcggcgcgttgattatcggcgtggtagctggtctggcgggcttgtggggcgttaccatgctcaaacgcttgctgcgggtggatgatccctgcgatgtcttcggtgtgcacggcgtttgtggcattgtcggctgtatcatgaccgggatttttgccgccagcagcctgggcggcgtgggcttcgctgaaggtgtgacgatgggccatcagttgctggtacagctggaaagcatcgccattacgatcgtctggtccggtgttgtggcatttatcggctacaaattggcggatctgacggttggtctgcgtgtaccggaagagcaggagcgagaagggctggatgtcaacagccacggcgagaatgcctataacgcgtaacaagcactgcaaaaaacagccggacggttttcacctccggctatttttttaattgtgattacgcatcaccccttcctgaacggtgctggcaaccagtacgccgtcttgggtataaaactcaccgcgcacaaagccacgtgcgctggacgcgctggtgctctccacgctatacagcagccattcattcaaattaaacgggcgatggaaccacatggaatggtcaatggtggcaatctgaatccccggttcgagaaaaccgatgccgtgcggctgtagagctaccggcaggaagttaagatcagaagcgtaaccgagcagatactgatgaacgcgcaggtcatccggcacgctaccatttgcgcggatccacacctgacgatgtggttctgcgacgtgacctttcagtgggttatgaaactccaccggacggacttccagcggacgatcgcagatgaatttatctttcagcactggcggcagcaggtgcgccaggctttgggcgatttgcgtttcgctagggaggccatcaggcgctggcgcggacggcattgttttttgatgttcgaaacccgcttctggtgcctggaaagaggcagtcatataaaaaatcggtttgccgttttgaatagcagcaacccggcgggcgctgaagctgttaccgtcacgcagcgtttcgacatcataaataatcggcttcttactatcgccagggcgaagaaagtagctgtgaaagctatgtaccagccgctcttcagggacggtctcttttgcagcatacaaggcctgacccacgacctggccgccaaacacctggcgtaaacctaaatcttcactctggccgcgaaagagtccttcctcaattttttccagatttaacaatgtcagtaaattttttagcgcctgactcatataactctccagtaacaaagctgccgcagcaagccaaagtgagttgagtataacgcaaatttgctactggtccgatgggtgcaatggtctgaattacgggctaattacaggcagaaatgcgtgatgtgtgccacacttgttgacgttactattttgttaaccactcttccggcgaggaaagttagcccgctggtgcattgataataaggagaaatgaatgaaactcgtgcacatggccagtggtttagcggttgcgattgcgttggcggcttgcgcagataaaagcgcggatattcagacgccagcaccggctgcaaatacgtctattagtgcaacacaacaaccagctatccagcaaccgaatgtctccggtaccgtctggatccgtcagaaagtcgcactgccgcctgatgctgtgctgaccgtgacactttctgacgcgagcttagccgatgcaccgagtaaagtgctggcgcagaaagcggtgcgtactgaaggtaaacagagtccattcagctttgttctgagttttaacccggcagatgttcagccgaacgcgcgtattctgttgagtgcggcgattaccgtgaatgacaaactggtatttatcaccgataccgttcagccggtgatcaaccagggcggaactaaagccgacctgacattggtgccggtacagcaaaccgccgtgccggttcaggccagcggtggcgcaacgactaccgtacctagcactagtccaactcaggtgaatccgtctagcgcagttccagctcctacgcaatattaagcgacgttaaccctctccgcccggagagggttagtagttccagcgataacgctgcaagtcgatttgcccgcttccgcttaccatcacaccttctgccagtaatgcctgtcgctgacgctgtaaatccggtccggttaggctaattgtgccgtggcgattaaccacccggtgccagggtaaggtgctgccttcagggagacgctttaacacaccgcccacctggcgcgcggcgcgggggcttcccgccagtttcgccacatcaccgtaagtggtgacatagccttcgggaatagcggcgacgatttgccagacgcgttggggaaaactatcttctttttccatcttttcttcctgaggtaatttttcagcataatctggaaaaacgccgctgtgaagtcgcattgcgcaagaaaccagcatctggcacgcgatgggttgcaattagccggggcagcagtgataatgcgcctgcgcgttggttctcaacgctctcaatgggggctctgttggttctcccgcaacgctactctgtttaccaggtcaggtccggaaggaagcagccaaggcagatgacgcgtgtgccgggatgtagctggcagggcccccacccatttctgcctcccaccgtttcgtcaaaaaatcccaacatggctaaactttaaccacaactgacgtcgcaagaattgtctggctgcgcagtacgcttcggaggtatgtctgatgaagtatgttgatggttttgtggttgccgttcctgccgataaaaaggatgcctatcgggaaatggccgctaaggctgcgccattgtttaaagagtttggcgcgcttcgtattgtcgaatgctgggccagcgatgtaccggatggcaaagtgaccgattttcgtatggcggtgaaagcggaagagaatgaagaggttgtctttagctggattgaataccctagtaaagaggtccgcgacgctgctaatcaaaagatgatgagcgacccacggatgaaagagttcggcgagtccatgccgtttgacggcaagcgaatgatctatggcggattcgagagtatcatcgacgaataagtagcgtgacgggctgtgcggcgtgccgtcagcccaaaaattcacaaatgttgctcggcccagcgtaagaaatcttctttcggtaatgccttgctgtagagccagccctgaccgtagtgcacgccatgctggcgtaaccactcttcttgtttactggtttcgattccctccgctaccattttcagtttcagtgtttttgccatttcgatgatatgcggcgtgacatttttatattccagcgcatcaacgaaagatttatcgatcttcagaatgtcgacatccagatcctgtaaataacttaaactactataccccgtaccaaaatcatcaagataaatttcatggcccgcctcccggtagcgagaaattatcggggcgctggttttcggatcggcaaactcgcgttcagtgagttcaagcgcgatctgtctgggattaacctgatagtgattgatcatgtcacgcagcaattgcgggattttttcgctggtgagcacgggggattcaagattgatgctaatatgctgctgtggatgctgacgcagccagtcgcccatatcttcaaagacgcttcttataatcagtagcgtcaatggctcagaaaggcccgtttgctgtgccagcggaataaaactatctggactcaaccaactaccgtctgtctgcggccagcgcgccagtgcctcagcaccgacaattttgccattggctaaggagacaatcggctgatagtgcacgcaaatatcacgattttcgatagcatcctgcagccgatgatgcggactctgaatacggcgcaaaatacgcagcacaaacatcgctgccagcaggccaatcaccaacccgagcggtaaccaaataaagacttgccgatgccagcctttctgcaacattttcgtactagcccatgtgatgatgctaatattcatctccggtaagggcaggatatcgtaaatgattccattattttcgatatgctcaccgggtgttttttgtagcctggtaataattccctgagcaatttcatcgctgctggttatgacaacgttatgggcattgccaataatggcggcatcaatttgccaactgctatagggaatgacatcaataaaggaagcggggtcgatcatgacgacataatgtgccgttcccatggcgaccatgtaacggataatgcctaaatcgttatggcttgttaaccagacacgataaccatctttgctaattttacctggctcggggaaggtatcgggcggactttcatgctccagagagctacactggggaacgttgttatcgatataagccacttcctgaatatagcgataactgtaagatacccgacgcatttccatgagatgggcttcgctacaggcagcgccttgccatctttccagctcctgcagcgcatctttcccttgtgtcgccaccttattggctcgaatagcgacgcgggaggaataggtatccagctcttcaataaagcttgtttctacctgctgatgggccagccagatgcttaagccgacaggcagcaatacactaagaatcagtactccgctaataaggccgaccagatgtcgtgttctcaccagcatatccttattaacacagtgtagggaaagtatatctgattgtggaaaaaggctggctggagataaggaggtagagctggtatttcatgaagtgatgggtggaaacgatcattgtcatttgaccaggcgcagagctttacgcctggtatgtaaccctaacttaagatgtactttcggcgcgagcgagggtaaaaatatcgtaaaaagacagttcacctttacggacgatcattttttgcagttgttccttatgaacatccgcgacacgcggagagttcaagatggcttcaaccagcgcggcaggtacaaagcgcgtgttgtaccattcgccgttatagcaaacgcggaaatccagcacgtcgatatcttcatagcggtagcgtgggtagacatcgaaaaagaagaaaccattaagcaggataaataatacaaccagtagccagacagagccactcagcgtttcggactgcaacatcaccgccagggtggcaaaaaaagcaacgtacataccgataaacagccccggatgtttacggataaaactgatactaaagcggggtttgttgtcgcgtttttcgcgggtattcagagactcaatcgtttcggtcagcaggcgttgtatttcggtcatcgtttgccttcgtggtatctgcaactttccagggaacaccctattttaacgtgggaatagtagaggggaagtaacagatctaccacaattttgcataacagttgcgaaaaaccgattacaattttttaattattctggctggattaccgcccacgacaacgttgtccgggacatcttttgtgacaactgcaccactggctaccacgacgttatcaccaatggtcacaccagggttaatgaccgcgcgtccgccaatccagacgttattaccgatggtgacgggtttccccagttcagcaccgctattacgtgctacagggtcgatgggatgtgttgccgtgtagatatgaacgcctggtgccaacatacagttatcaccgatgcgaatagggcagacatcaagcatcacgcaatcgaagttggcgaaaaaattattaccgagaaaaatgttatagccatagtcacagcgaaacgttggctcaatataagcctctgtcacctgaccgaatagatcagcgagaatttgctggcgtaatgtgtgctcttccgccagggaatgattgtatcggtgaataagctgacgagcgcgcaggcgatcgcgagataacgtctcatctgcgctgcgatacaactcaccagcaatcatcttttctttttctgtgctcattactgacctccggttgctgaaaatgcggcaacacagtaagacgaaaagtcagtgaagagaacgttcccattacatctgtgtgataaagatcacatagggtatgtcttcatggcgaaaaagtataaaattcttaataaacagccggttatagctccgaaagcgaattatttattagcgaataaatttccatacactggaagggatcttgtcgtacagtttattcatggtcaattcggcgaggcggtgatctgcggcactgtaaaataccgccagttcattatcacttaattcgtatttatttttctcgataacacgctccagcgtgtcaattgtctggcaacgacgtaaacgcattaaataatcggttttcgttaaaggtttttcggacatacttctacctatggttgtaataattttaacaagataaactcgcaggattctctttcgtcgcattgacaaaacaacggaatagtcgattaccactcttccgccatttctgaagatcctgcatattaataccataactactgaacaacataaaggtgtcatccagatattcgtcgatctgctcaatgagcttattgtcttcattatacttaattttgtaattaagtgcgaaggtcgcaatatgctcaatcagttcattcaactggaggttgatcgcgctggttgggtcgtttacccagccatgattgctttcttcaaggtttgcaaggcagtcatgatacagggtttcacagagaaacttaagctgtgcgatatcatgtcttttgggactgtattcatccataacgcgtccccttcttagcggttgaactaacggacacctttcgggatggaaaaaacttactgacctggacttgccctctcgtttgttagcttaactataagccactctttgcaggttttcatcgcattattacgaaaaattacaattaggaaggaagcgggacaggactcactttttcatactagcactaacccgcagcaggtaaaagcagtttgctcgaactattcataacatttcaggattatcgccagatgaaattggtgacactaataccaggattgctctgaatatgacgtaataaccgaggaatgaataaagaattaccgcaaataattaagaatagcctctaaatgattatggattattaaatctattagcgctacttaatataaattaactaacaatcagtattttttatgaattttatccgtggttaatactggttttcgtatgagatcctgagttggtggttcaattactccttaatgttcgtaggttatgcataaaaaaggccgcttacgcggccttagtgattacacgttgtatcaatgatgatcgacagtatggctgtgctcgatatcttcattcttgcggctaaagcggcggcgaaccaccacaaagaataccggaacgaagaagattgccagtaccgttgcggtcaccatcccgcccattacaccggtacctactgcgttctgcgcgccggaaccagcaccagtactgataaccagcggcataacgccgaggataaacgccaggctggtcatcaggatcggacgtaaacgcatccgcaccgcatcaagcgtcgcttcaatcagacctttaccttctttatccatcaagtctttggcgaattcgacgataaggatcgcgttcttcgcgctcaacccaatggttgtgagcaggcctacctggaagtaaacgtcattggtcaggccacggaaggtggcagccagcaacgcaccgataacccccagcggaacgaccagcataacggagaacggaatgctccagctctcgtacagcgccgccagacacaggaacacgacaatcaagctaatcgcgtacagactaggtgcctggttgccggagagacgttcctgataggacatccccgtccagtcatagccaacaccggtaggcagtttgctcgccagttgttccatcagctccattgcttcaccggtacttttacccggtgccgcctggcctaagatttccatggatggcaggccgttgtaacgttccagacgcgggctaccgtactcccaacgagaagaggagaacgcgctgaatggcaccatctgaccatcagcagcacgaacataccagtcgccgatatcatccggcagcatacggtatttcgcttcactcatgacataaactttcttcacacgaccgcggtcgataaagtcgttcacatagctgccgccccatgcagcgcccagagtggtgttaatgtcgttgatagaaacacccagcgcctgcgctttttcctggtcgatatcaatcttaaactgcggggtatcttccagaccgtttggacgtacgctggtcaacatatcagggtgcttcgctgcttctgcaagcaactggttacgcgcctgagtcagtttttcgtgaccaaggccagcctggtcaatcagctcaaagtcaaagccggttgcagtacccagttccacgattgcgggcaggttaaaggcgaaaaccatcgcatctttgatttggctgaaagcgcgtgttgcacgcatggtaatcgcttcaactttgttttcttcgcccggacgatcggcccagtccttcaaggaaacgaacgcaataccggtattctgaccacgtcccgcaaagccgaagccgttaacggcgaacacgctctcaacgttgttcttttctttggtcagatagtaatgcgttacctcattgagcactttctgtgtacgttcctgcgttgcacctgctggcagctgaaccatggtcataaacacgccctggtcctcatctggcaagaaggagcttggcagacgcacgaacagataggccatgccgaccacgatgatcagatacagcaccaggtaacgccccgtactgcgcagaataccgcctacgctgtcggtgtagtggtgcgtgctcttctcgaacatgcggttaaaccagccgaagaagccttttttaccttccccgtgatcgcctttggcaatcggtttcagcatggtggcacaaagagctggagtcaggatcaacgccaccagtacgctcagcgccattgcactaacaatggtaatagagaactgacgatagatagcaccagtagaaccgccaaagaaggccatcggtacgaataccgcgctcagtaccatcgcgataccgaccagagcgccctgaatctgccccatgctcttacgggtagcttcttttggcggcaaaccttcttccgccataacacgctcaacgttttctaccacaacgatggcgtcatccaccaacaggccgatggcgagcaccatcccgaacattgttagcgtgtttatgctgaagccaaaggcggcaaggacggcaaaggtcccgagcaataccaccggtacggcaatggtcggaatcaacgtcgcgcggaagttctgcaggaacagatacataaccaggaacacgaggatgatcgcttcgaccagcgttttaaccacttcgtgaatagagattttcacgaacggcgtggtgtcgtatgggtaaacaattttcagaccgctcgggaagaacggttccatcttcgccagttcagcacggattgccgcagcggtatccagcgcgtttgcaccggtcgccagcttgatccccagaccggaagccggttggccgttaaactctgcgatgatgtcgtagttctcaccacccagctcaatcttcgcgacgtcacgcagcagcacgcgggaaccatcctgattcactttcagcaggattttgccgaactcttcagtagaggtcagacgcgtctgagcaataatagaggcgttaagctgttggcctttcaccggcggcgtaccaccgagctgacccgccgcaacctgggcgttctgcgctttgatggcggtaatgacatcaaccggcgttagctggaatttgttcagctcattcgggttcatccagatacgcatcgcgtactgactaccgaacaactgaacatcacccacgccgctcgtacggctgatggcatctttcatattcgccgccacgtagtcggagatatcctcctgcgtcatggtgccatcggtgttgataacgccgacaaccatcaggaagctgctggaacttttctcaacgctcaccccttgctgctgaacttcttgcggcagcaacggcatcgccagctgcagtttgttctgcacctgaacctgcgcgatatccgcatcagtaccagactcaaaggtcagggtgatctgcacggtacccgtggagtcactgttagaggacatgtacatcaggttatcgataccgttcatattctgttcgataacctgtgtcaccgtgtcctgcactgttttcgcatcagcgccggggtaggaggcggagatcgttactgccggcggtgcaatcgtaggatgttgcgccaccggcagtttgaggatcgccagcccccctgccaacatgatgataatggcgatcacccacgcaaaaatcgggcgatcgataaagaaattaggcatgtcttaacggctcctgtttaagttaagacttggactgttcaggctgagcaccgcttgcggcttgctggttattatcagcggtaacttcttgtgcttttacctggacaccaggacgcactttctgcagcccacttattactacgcgatcgcctgctttcagaccttctgtcaccagccacttatcgccaatagcctggcttgcaacgatcggacgggtttccactttgtcatccgcgccaactaccagtacggtggcatcgccacgcggcgtacgggttacgccctgttgcgggactaaaatagcgtttggattaagcccttcttccagacgtgcgcgcacgaacatacccggcagcagagtgtgatccgggttcgggaagatagcgcgtagggtgatagacccagtggtctgatcaacggtaacgtcagagaattccagcgtaccgtcctgcgggaacttaatgccgtcactggtgatcagactcactttggctttgccgttctcttgtttcagcgtgccattcgccagttcctgtttcaggcgcaggaagtcgttgctggactgggtcacatcaacgtagatcggatcaagttgctgcacggttgccagcgcagtcgcctgaccgttctgtaccaatgcgccttccgtcacgttgctcttaccaatgcgaccgctaatcggagaggtgactttggtgtaagccagattgatccgcgcagtttcaacggcagctttcgccgcagttaccgcagcattcgcctgttgcgcatcagccagagcctgatcgtactcttgcttactgatgtactgagtaccgagcagtttctgataacgattcaccgtcaattgcgcgatattggctgcagcctgggctttcgccagatcacctttcgcactgtcgtatgtcgcctgataggtcgcaggatcaatctgatagagagagacacctgcttcgatgtcgctaccttctttgaaattacgcttcaggataatcccgctaacttgaggacgaacttctgcgatccggtaggcactggtgcgacccggaagctcggttgtgatctgcagaggttcagttttgactgttactacgccaacggcgggcatctgctggccaccttgttgggcctgtttgtcgtcacatcctgttagggctaagctgccactgagcatcagaacgaccgccagaggcgtaaaccctctgtttttgttcatatgtaaacctcgagtgtccgatttcaaattggtcaatggtcaaaagttaataaacccattgctgcgtttatattatcgtcgtgctatggtacatacattcacaaatgtatgtaaatctaacgcctgtaaattcacgaacatatggcacgaaaaaccaaacaagaagcgcaagaaacgcgccaacacatcctcgatgtggctctacgtcttttcagtcagcagggggtaagttccaccagcctgggcgagattgcaaaagcagctggcgttacgcgcggtgcaatctactggcattttaaagacaagagcgatttgttcagtgagatctgggaactgagtgaatccaatattggtgaactagagcttgagtatcaggcaaaattccctggcgatccactcagtgtattaagagagatattaattcatgttcttgaatccacggtgacagaagaacggcgtcgattattgatggagattatattccacaaatgcgaatttgtcggagaaatggctgttgtgcaacaggcacaacgtaatctctgtctggaaagttatgaccgtatagaacaaacgttaaaacattgtattgaagcgaaaatgttgcctgcggatttaatgacgcgtcgcgcagcaattattatgcgcggctatatttccggcctgatggaaaactggctctttgccccgcaatcttttgatcttaaaaaagaagcccgcgattacgttgccatcttactggagatgtatctcctgtgccccacgcttcgtaatcctgccactaacgaataaccctgaatctgactccaggatttttcctggacattttcgtcgttgctattctggttcactgcgtcgtgatattcttgcggtttgactttttcaggtcgttcttcaggttcagaaaccttcattcatcatgactatgttccagtattacaaacgaagtcggcattttgtttttagtgcatttattgcttttgtttttgtcttgttatgccagaacacggcgtttgcgcgggcgagtagcaatggtgatctgccgacaaaagcggacctgcaggcgcaacttgacagtctaaataaacaaaaagatctttctgctcaggacaaactggtgcagcaggatctgacagatacattagccaccctcgataaaatcgatcgcataaaagaagagacagttcagctacggcaaaaagtcgctgaagcgccggaaaaaatgcgccaggcgaccgcggcgttaacagcacttagcgatgtcgataacgacgaagaaacgcgcaaaattctgagcacgctgagcttgcgccagctggaaactcgcgttgcccaggcgctggacgatttgcaaaacgcacaaaacgatctggcgtcttataacagccagctggttagcttacagacgcagcccgaacgcgtgcaaaatgcgatgtataacgctagccagcagctgcaacaaattcgcagtcgtctggatgggactgatgtcggcgagacagccttacgtcccagccagaaagtgttaatgcaggcccagcaggcgttgctgaatgcggagattgaccagcagcgtaaaagcctggaagggaacaccgtcttgcaggataccttgcaaaagcaacgtgattacgtgacggcgaacagcgctcgtctggagcaccagttacaactgttgcaagaagcggtaaacagcaagcgcctgactttaaccgaaaaaacggcgcaggaagccgtctccccggatgaagccgcgcgtattcaggctaatccgctggtgaagcaggaactggaaattaaccagcagttaagtcagcgtctgattaccgcgactgaaaacggtaatcagttgatgcagcaaaacattaaagtcaaaaactggctggagcgggcgctgcaaagcgaacgcaatattaaagagcagattgccgtcctgaagggcagcctgctgttgtctcgtatcctttaccagcaacaacaaacgctgcccagcgcggatgaactggaaaacatgaccaaccgcatcgcggatttgcgtctcgaacagtttgaagttaaccagcagcgtgatgcactcttccagagcgatgcgttcgtcaacaaactggaagaaggtcacaccaacgaagtcaacagcgaagttcacgatgcgttattgcaagtggttgatatgcgtcgcgaattgctggatcaactcaacaaacagttgggtaaccagctgatgatggccattaacctgcaaatcaaccagcagcagttaatgagtgtgagcaaaaacctgaaatccatcctgactcagcaaatcttttgggtgaacagtaaccgtccaatggactgggactggatcaaagcgttcccgcaaagcctgaaagatgaatttaagagcatgaaaatcacggtgaactggcaaaaagcctggcccgccgtttttatcgctttcctcgctggtttgccgctgctgttgattgccgggctgatccactggcgtctgggctggctgaaagcgtatcaacaaaaactggcttccgctgtgggttccctgcgtaacgacagccagctcaacacaccaaaagcgatccttatcgacctgatccgtgcgctgccggtgtgcctgattattctcgcggttggcctgattctgttgaccatgcagctcaacatcagcgaactgctatggagcttcagcaaaaaactggcgatattctggctggtgtttggcctgtgctggaaggtactggagaaaaacggcgttgccgtacgtcacttcggcatgccggaacagcagaccagccactggcgtcggcaaattgtccgcatcagtctcgcattgctgcctatccatttctggtctgtggtggcagaactttccccgctgcatctgatggatgatgtgctggggcaagcgatgattttcttcaacctgctgctgattgccttcctggtatggccgatgtgccgcgaaagctggcgtgataaagagagccacaccatgcgactggtcaccattaccgtgctgagcataatcccgattgcgctgatggtgctgactgctacaggctacttctacactacgctgcgtctggcaggacgctggattgaaaccgtttatctggtgatcatctggaacctgctgtaccagacggtactgcgtggcttaagcgtagcggcgcggcgtatcgcctggcgtcgtgcgctggcgcgtcggcagaatctggtgaaagagggcgcagaaggtgctgaaccgccggaagaacccaccattgcactggagcaagttaaccagcagacgctgcgtattaccatgttgctgatgtttgcgctgttcggtgtcatgttctgggcaatttggtccgatttgatcaccgtgttcagctatctcgacagcatcacgctctggcattacaacggcactgaagctggcgctgcggtggtgaaaaacgtcaccatgggcagtctgttgtttgcgattatcgccagtatggtggcctgggcgttgattcgcaacctgcctggtttactggaagtgctggtgctcagccgactgaatatgcgccagggcgcgagctatgccattactaccatccttaactacatcattattgctgttggtgcgatgacggtgttcggaagcctgggcgtctcttgggataaactccagtggctggccgcagcattatccgtaggtcttggttttggtttacaagaaattttcggtaacttcgtctccggtttgatcattctattcgaacgtccggtgcgtattggcgatacggtaaccattggtagcttcagcgggacggtaagtaagatccgtattcgtgcgacaacgattaccgatttcgatcgcaaagaagtgatcatcccgaacaaagcgtttgttaccgagcgtctgatcaactggagcttgactgacactactacgcgtctggtgatccgtctcggcgtggcctatggctccgatctggaaaaagtgcgtaaagtgttactgaaggcggcgactgagcacccaagggtgatgcacgaaccaatgccggaagtcttctttacggcatttggtgccagcacgttggatcatgagctgcgtctgtatgtgcgtgaactgcgtgaccgtagtcgtactgtcgatgagctgaaccgtactatcgatcagctgtgccgtgaaaacgacatcaacattgcctttaaccagcttgaagtgcatctgcacaacgagaagggcgatgaggtgacggaagtaaaacgcgactacaaaggcgatgacccgacgccagcggtagggtaaaaacgaaagggggcaacatttagttgccccgagattgctaacaaagtgcgcgttgttcatgccggatgcggcgtgaccgccttatccggcctacgaaaccgcaagaattcaatatattgcaggagcggtgtaggcctgataagcgtagcgcatcaggcagttttgcgtttgcccgcaaccttaggggacatttagcgaccccatttatttctcacttttccgcctcatcatcgcgcgttaatttcttttcataatcacgctttacaatatccagcgcgcgcagcacggtactggcagggatctgattttcctccagcagcacaatcaaatcgacagccagtttgacatcgtcaggggcattttccagactcatattctctccattgttagcgggttaaacgcgctaacctgttttcgattttttccagcgcatggcggcagcgtgccaggcgcgcttcataggcttccacttcacgatgcagcgtttgctgttccacgagatcggtcacccgcgccagacgggctctgcgttcggcaaccatctcacgtagccgccgctcaaaatcctgatgctgaatacgtttacgctgccagcgggcaattttcggtggtgcactgtcccactcgcgcaaactccaggcggaggcttcacgcgcgatggcttccagttgtgccgccagatgttccgccagccaggccacttgcggcagctgttgctgctcaactgcatgacgaagcgcagccagattatcgcccgcctcgtcgagacaagcctgtagtgttgtcgcacgagtctgaaaaagatgcctgtcgaaacgagcacttagcgtggcgaactgactcaccggggcacaacgctgacgcagcgtagcgagctgtccttccagtttttccagcagcagggcggttttcacgataagacctcaatgaaaatgataattgttatgctaaagtagccactctgtaagctgacaacactcaatatgcaacgaatcattttaatcatcattggctggctggcggtagtgctgggtacgctgggcgtggtattaccggtattaccgacgacgccgtttatcctgctggcggcctggtgctttgcccgttcttccccgcgctttcacgcctggttgctgtaccgcagttggtttggcagctatctacgtttctggcagaaacatcatgcgatgccgcgcggcgtcaaaccgcgggcgattttgcttattttgctcacgtttgccatttctctgtggttcgtccagatgccatgggtgcgcatcatgttgctggtaattctcgcctgtttgcttttctatatgtggcgaattccggtgattgatgaaaagcaagaaaagcactgaagcacaacaatcgcagttgcaattattgcgtacagccagtacattctggcgttttcgagcacaggcgcaggcggtcaaaggttaaacaactgttacttttgatacgtttaaaacgcgccgtgagtaccaccgtaacaagcaggcatacacttatgaccgcgactgcacagcagcttgagtatctcaaaaatagcatcaaaagcattcaggactacccaaaacccggcattcttttccgcgatgtcaccagcttactggaagacccgaaagcttacgctctcagcatcgacttgctggttgagcgttacaaaaatgcgggcattaccaaagttgtcggcaccgaagcgcgtggcttcttgtttggcgctccggtagctctgggtctgggcgttggctttgtaccggtccgtaaaccgggcaaactgccgcgtgaaaccatcagtgaaacttacgacctggaatacggcaccgatcagctggagatccacgttgatgccatcaaaccgggcgacaaagttctggtggtggacgacctgctggcaaccggcggcactatcgaagcgaccgttaaactgatccgtcgtctgggtggtgaagtggctgacgctgcgttcattatcaacctgttcgatctcggcggcgaacagcgtctcgaaaaacagggcattaccagctacagccttgtcccgttcccgggccattaattatcgccagtcttgtgctgcccacgctacggacagcacaagatgtgcattcagcctcgccgttctgacggggctgtgttagcattaccccttcgtgaatccaccttccagcgtttcagagcctgccaatgagttatcaggtcttagcccgaaaatggcgcccacaaacctttgctgacgtcgtcggccaggaacatgtgctgaccgcactggcgaacggcttgagcttggggcgtattcatcatgcttatcttttttccggcacccgtggcgtcggaaaaacctctatcgcccgactgctggcgaaggggctaaactgcgaaaccggcattaccgcgacgccgtgcggcgtgtgcgataactgtcgtgaaatcgagcaggggcgctttgtcgatctgattgaaatcgacgccgccagccgcaccaaagttgaagatacccgcgacctgctggataacgtccagtacgctccggcgcgtggtcgtttcaaagtttatctgatcgacgaagtgcatatgctgagccgccacagctttaacgcactgttaaaaacccttgaagagccgccggagcacgttaagtttctgctggcgacgaccgatccacagaaattgccggtgacgattttgagtcgctgtctgcaatttcatctcaaggcgctggatgtcgagcaaattcgccatcagcttgagcacatcctcaacgaagaacatatcgctcacgagccgcgggcgctgcaattgctggcacgcgccgctgaaggcagcctgcgagatgccttaagtctgaccgaccaggcgattgccagcggtgacggccaggttagtacccaggcggtcagtgcgatgctgggtacgcttgacgacgatcaggcgctgagcctggttgaagcgatggtcgaggccaacggcgagcgcgtaatggcgctgattaatgaagccgctgcccgtggtatcgagtgggaagcgttgctggtggaaatgctcggcctgttgcatcgtattgcgatggtacaacttagccctgctgcacttggcaacgacatggccgccatcgagctgcggatgcgtgaactggcgcgcaccataccgccgacggatattcagctttactatcagacgctgttgattggtcgcaaagaattaccgtatgcgccggaccgtcgcatgggcgttgagatgacgctgctgcgcgcgctggcattccatccgcgtatgccgctgcctgagccagaagtgccacgacagtcctttgcacccgtcgcgccaacggcagtaatgacgccaacccaggtgccgccgcaaccgcaaagtgcgccgcagcaggcaccgactgtaccgctcccggaaaccaccagccaggtgctggcggcgcgccagcagttgcagcgcgtgcagggagcaaccaaagcaaaaaagagtgaaccggcagccgctacccgcgcgcggccggtgaataacgctgcgctggaaagactggctagcgtcaccgatcgcgttcaggcgcgtccggtgccaagcgcgctggaaaaagcgccagccaaaaaagaagcgtatcgctggaaggcgaccactccggtgatgcagcaaaaagaagtggtcgccacgccgaaggcgctgaaaaaagcgctggaacatgaaaaaacgccggaactggcggcgaagctagcggcagaagccattgagcgcgacccgtgggcggcacaggtgagccaacttagcctaccaaaactggtcgaacaggtggcgttaaatgcctggaaagaggagagcgacaacgcagtatgtctgcatttgcgctcctctcagcggcatttgaacaaccgcggtgcacagcaaaaactggctgaagcgttgagcatgttaaaaggtagtacggttgaactgactatcgttgaagatgataatcccgcggtgcgtacgccgctggagtggcgtcaggcgatatacgaagaaaaacttgcgcaggcgcgcgagtccattattgcggataataatattcagaccctgcgtcggttcttcgatgcggagctggatgaagaaagtatccgccccatttgatcgtaagcacagcttacgttcgtcatccttaacgtgattgagagagaaacctatgtttggtaaaggcggtctgggtaacctgatgaagcaagcccagcagatgcaagaaaaaatgcagaaaatgcaggaagagatcgcgcagctggaagtcaccggcgaatctggcgcaggtctggtaaaagtgaccatcaacggtgcacacaactgccgtcgcgtagagatcgacccgagcctgctggaagacgacaaagagatgctggaagacctggtggctgcagcattcaacgacgcagcacgtcgtattgaagaaacgcagaaagaaaaaatggcctctgtatcctccggaatgcagctgccgcctggctttaagatgccgttctgatgcaaaccagcccgctgttaacacagcttatggaagcactgcgctgtctgccgggcgttggcccgaagagcgcgcagcgtatggcgttcacgctgcttcagcgcgatcgtagcggcgggatgcgtctggcgcaggcgctcacccgggcgatgagcgaaatcggccactgcgccgattgccgcactttcaccgaacaggaagtctgtaacatctgtagcaatccgcgtcgtcaggaaaacggtcaaatctgcgtggtggagagtccggcggacatctacgccattgagcagacggggcagtttagtggtcgttattttgtgttgatggggcatctgagtccgctggacggcatcggtccggatgatatcgggcttgatcgtctggaacagcgtctggcagaggaaaaaatcactgaagtgatcctcgccaccaaccccacggttgaaggtgaagctaccgctaactacattgccgagctttgcgcgcaatatgacgtggaagccagccgaatcgctcatggcgttccggttggcggcgagctggaaatggtcgacggcaccacgttgagtcactcccttgccgggcgtcataagattcgtttttaagcaaacgagagcaggatcacctgctctcgcttgaaattattctcccttgtccccatctctcccacatcctgtttttaaccttaaaatggcattattgaggtagacctacatgaaaggacaagaaactcgtggttttcagagtgaagtgaaacagcttctgcacctgatgatccattctctctattccaataaagaaatcttcctgcgtgagcttatctctaacgcctccgatgcggcggacaagctgcgtttccgtgcgctctctaacccggacctgtacgaaggtgatggcgaactacgcgttcgtgtctctttcgataaagacaagcgtacgctgaccatctccgataacggcgtggggatgacccgcgacgaagtgattgaccatctggggactatcgctaaatccggtaccaaaagtttcctcgaatccctgggttctgaccaggcgaaagacagccagctgatcggtcagtttggtgttggtttctactctgcgtttatcgtggccgacaaagtgaccgtgcgtactcgcgcggcaggcgaaaaaccagaaaatggcgtcttctgggaaagcgctggcgaaggtgaatacaccgttgccgacatcaccaaagaagatcgtggtactgaaatcaccctgcatctgcgtgaaggcgaagacgagttcctcgatgactggcgcgtgcgttccatcatcagcaaatactccgaccatatcgcgctgccggtagagatcgaaaaacgcgaagagaaagacggcgaaaccgttatctcctgggagaaaatcaacaaagcgcaggcgctgtggactcgtaacaagagcgaaatcaccgatgaagagtacaaagagttctacaaacacatcgcccacgactttaatgatccgctgacctggagccacaaccgtgttgaaggtaagcaggagtacaccagcctgctgtacatcccgtcccaggctccgtgggatatgtggaaccgcgatcataaacacggcctgaaactgtatgttcagcgtgtgttcatcatggacgacgcagaacagttcatgccgaactatctgcgcttcgtgcgtggtctgattgactccagcgatctgccgctgaacgtttcccgtgaaatcctccaggacagcacggtaacgcgtaacctgcgcaatgcgctgaccaagcgtgtgctgcaaatgctggaaaaactggcgaaagacgacgcggaaaaataccagaccttctggcaacagtttggcctggtactgaaagaaggtccggcggaagatttcgctaaccaggaagcgatcgccaaactgctgcgttttgcttctacccataccgattcttctgcgcagaccgtatctctggaagactacgtttcccgcatgaaagaagggcaggagaaaatctactacatcaccgcagacagctatgcggcagcgaagagcagcccgcacctggaactgctgcgtaagaaaggcatcgaagttctgctgctttccgaccgcatcgatgagtggatgatgaactatctgactgagttcgacggtaaaccgttccagagcgtgtctaaagttgacgagagccttgaaaaactggctgacgaagttgatgagagcgcgaaagaagcggagaaagcactgactccgttcatcgaccgtgtgaaagccctgctcggcgagcgcgtgaaagatgtccgtctgactcaccgtctgaccgatacgccagcgatcgttagcaccgacgcggacgaaatgagcactcagatggcgaaactgttcgctgcggcgggccagaaagtgccagaagtgaaatacatcttcgaactgaacccggatcacgtactggtgaaacgtgcggcagatactgaagatgaagcgaagttcagcgagtgggtagaactgctgctggatcaggcgctgctggcagaacgcggcacgctggaagatccgaacctgtttattcgtcgtatgaaccagctgctggtttcctgatgtaatgccggatgaccttcgtgtcatccggcatttttcttttcatcatctgcactttccgcaaattatctcgccattaaccgtttcagccccaggtgcctttcttgaggcaatcgcctgttggtggtatcgtttatcgctttttcaaaaaattcgacacattttaaggggattttcgcaatgcgtatcattctgcttggcgctccgggcgcggggaaagggactcaggctcagttcatcatggagaaatatggtattccgcaaatctccactggcgatatgctgcgtgctgcggtcaaatctggctccgagctgggtaaacaagcaaaagacattatggatgctggcaaactggtcaccgacgaactggtgatcgcgctggttaaagagcgcattgctcaggaagactgccgtaatggtttcctgttggacggcttcccgcgtaccattccgcaggcagacgcgatgaaagaagcgggcatcaatgttgattacgttctggaattcgacgtaccggacgaactgatcgttgaccgtatcgtcggtcgccgcgttcatgcgccgtctggtcgtgtttatcacgttaaattcaatccgccgaaagtagaaggcaaagacgacgttaccggtgaagaactgactacccgtaaagatgatcaggaagagaccgtacgtaaacgtctggttgaataccatcagatgacagcaccgctgatcggctactactccaaagaagcagaagcgggtaataccaaatacgcgaaagttgacggcaccaagccggttgctgaagttcgcgctgatctggaaaaaatcctcggctaattcgaaagcgcgcacggacagtcccctcgccccctcggggagagggttagggtgaggggaacaggcccgcacaagcaaacttatcagcaatctcaggccggatattcattcggccttttacaaaaacctcaatctgcgctattcctttttctgatttgacctctcacagcaattagttcttcttcctcacttttccgctacaattatcaacaagttgaatcgataagaggcggtaatgcgtcagactaaaaccggtatcctgctggcaaacctgggtacgcccgatgcccccacacctgaagcggtaaaacgctatctgaaacaatttttaagcgacagacgcgtggttgataccagtcggttgttatggtggccattgctgcgcggcgtgattttgccgctgcgcagcccgcgtgtggcgaagctgtatgcctctgtctggatggaaggtggcagcccgctgatggtttacagccgccagcaacagcaggcgctggcacaacgtttaccggagatgcccgtagcgctgggaatgagctacggcagcccaagtctggaaagcgccgtagatgaactcctggcagagcatgtagatcatattgtggtgctgccgctttatccgcaattctcctgttctacggtcggtgcggtatgggatgaactggcacgcattctggcgcgcaaacgtagcattccggggataagctttatacgtgattacgccgataaccacgattacattaatgcactggcgaacagcgtacgcgcttcttttgccaaacatggcgaaccggatctgctactgctctcttatcatggcattccccagcgttatgcagatgaaggcgatgattacccgcaacgttgccgcacaacgactcgtgaactggcttccgcattggggatggcaccggaaaaagtgatgatgacctttcagagccgctttggtcgggaaccctggctgatgccttataccgacgaaacgctgaaaatgctcggagaaaaaggcgtaggtcatattcaggtgatgtgcccgggctttgctgcggattgtctggagacgctggaagagattgccgagcaaaaccgtgaggtcttcctcggtgccggcgggaaaaaatatgaatatattccggcgcttaatgccacgccggaacatatcgaaatgatggctaatcttgttgccgcgtatcgttaaagctgagcggtaaagaactgagcgccgtcgcgaagagcctcgtcggcggttttcatcatccgactataatgcaaaaaggcgtgcagcgtgcctgggtagagtttgaactcacagggctgctgatgcgccgctaacgtctggtaaagcagacggctgtcatccagcagcggatcgaactccgccccggcaataaaacagggcggaacttcgcgagtgagatcattattaaacagacagtaatacgggctctcgcggtccgcgtcgttgcttaaatatgcctcttcgtacatctgcaaatcctgttgcgttaagccatcccagacaccgcccaacagacgacgagtcacggaatcccgtaatccgtaaagcccataccacagcaaaacgcccgcaactttaccgcaatcgatctgtttatcacgcaaccacaacgcactggcgagcgccagcatggcacctgcggaatcaccggcaaagccaatgcgggacatattgatttgataatcctccgcctgctggtggaaataacaacaagcagccacaatttcctctatcgcttgcggaaaacgcgcttcaggactaagggtgtaatcaataccaatcaccgtacattggctgtagcttgccagcaggcgcatgatgcgatcgtgggtatcgagattgccgagaataaaaccgcctccatgcaaataaaatagcgtcgctgggctatctggctgcggacaaaagagacgtgtttccacctgcccatattttgttggaaccatgtaagctctggttgccatttctggagcgcccgcattccagaatcggcgctcaagcgtgtaatactgtcgttgctcagcaatcgttcccgttgcgggccagggcggtaaatccggctgaagagtattcacaacggtcttcatttcagcagaaataaggtccagaacaggtagtttgttttccggcttcatacaaaaactcctttcaaattacgtcattgtaaggaaccactgccatgaaaatgcgatcccgcctgctgatattgaaactggctgcgtctcgcgcgctcccgtcagattgtgttaacattcgccgctcagttaaccacccgtaaaaacaaccatgaaatttcccggtaaacgtaaatccaaacattacttccccgtaaacgcacgcgatccgctgcttcagcaattccagccagaaaacgaaaccagcgctgcctgggtagtgggtatcgatcaaacgctggtcgatattgaagcgaaagtggatgatgaatttattgagcgttatggattaagcgccgggcatagtctggtgattgaggatgatgtagccgaagcgctttatcaggaactaaaacagaaaaacctgattacccatcagtttgcgggtggcaccattggtaacaccatgcacaactacagcgtgctcgcggacgaccgtagcgtgctgctgggcgtcatgtgcagcaatattgaaattggcagttatgcctatcgttacctgtgtaacacttccagccgtaccgatcttaactatctacaaggcgtggatggcccgattggtcgttgctttacgctgattggcgagtccggggaacgtacctttgctatcagtccaggccacatgaaccagctgcgggctgaaagcattccggaagatgtgattgccggagccagcgcactggttctcaccagttatctggtgcgttgcaagccgggtgaacccatgccggaagcaaccatgaaagccattgagtacgcgaagaaatataacgtaccggtggtgctgacgctgggcaccaagtttgtcattgccgagaatccgcagtggtggcagcaattcctcaaagatcacgtctctatccttgcgatgaacgaagatgaagccgaagcgttgaccggagaaagcgatccgttgttggcatctgacaaggcgctggactgggtagatctggtgctgtgcaccgccgggccaatcggcttgtatatggcgggctttaccgaagacgaagcgaaacgtaaaacccagcatccgctgctgccgggcgctatagcggaattcaaccagtatgagtttagccgcgccatgcgccacaaggattgccagaatccgctgcgtgtatatagccacattgcgccgtacatgggcgggccggaaaaaatcatgaacactaatggagcgggggatggcgcattggcagcgttgctgcatgacattaccgccaacagctaccatcgtagcaacgtaccaaactccagcaaacataaattcacctggttaacttatagtagcttagcgcaggtgtgtaaatatgctaaccgtgtgagctatcaggtactgaaccagcatagtcctcgtttaacgcgcggcttgccggagcgtgaagacagcctggaagagtcttactgggatcgttaagttatcgtcggttcgtaggccagataaggcgttcacgccgcatctggcatttggctctcgatgcctgatgcgacgctggcgcgtcttatcatgcctacatatttttcatattttacatccggcaaccaccgtttaccccgtcaccacctcacccgccggtggcgtttccagcagttccagcatggtacgggcgatttcacgctcgcccatcactacctgattcgcaccacgttcggtgatatacgccacttcatcgtcataatgggcgcgggcaataatctcaatatccggatttttcgcgcgggcagatgccacaatctcacccgcttcataaccgttgggaatcgtcaggatcagccattttgcacattccagatgcgccagttgcataatttcttcgttcgccgcattgcccaatactgcgcggaccccgcgctctcgcagctcatcaacacgggttcgactcgtctcaatcaccaccagcggaatatcagaggcgagcaatttctcccccagcaggctgcctacacgaccgtaacccaccagtagcgcatggttgcaaatatccactgggatctgcttctcttcttcgattgcctcttccagcgtctgctcttccagcgtttcggtcttcgccagatatttctccagtagtgcgaacagtaccgggttgagcataatgctcaggatcgcccctgccagtaccaggttttgtccggcctgcggcagtaaattcaatgccattcccagtcccgccaggataaacgcgaactcaccaatctgcgccaggctggcggcgatggttaatgccgtacgttgggagtgaccaaacagtcgcaccaggaaaaatgcggctaagctcttaccaaacagaataatcgccagcgtcgccagcactgccagcggttgctgaatcagaattaacggatcaaacaacatcccgacggagacaaaaaacagcaccgcaaacgcgtcgcgcaatggcagcgtatcgtgggcggcacggtgactcagttcagactcgttcagtaccatcccggcaaagaacgcaccgagtgcaaaggagacatcaaacagctctaccgcaccaaaggcaacccctaacgccagcgccagcacgctcagggtaaacagctcgcgagaaccggttgccgcgctgcgtgccataatccacggcaccagacggcgacctaccagcatcataatggcgataaatgcgatcactttgccgatggtgatccccatatcgactgcaagagtggcaaagcccacatcgccctgttccatcattcctgccactgcgggcagcaacaccagcgtcagaaccattaccaggtcttccacaatcaaccaaccgatggcgatttgcccacgctgactgtcaattaattgccgttcttcaagtgcgcgcagtaacaccacggtactggcggtggaaagacataaaccgaacacgataccggtcattaagctccagcccagcacggcagagagcgccatacccagcagcgtcgccacggctatctgggcgatcgcaccgggaatggcgatggcctttaccgccatcaaatccttcaggctaaagtgcaaaccgacgccaaacatcaacagaatgacgcccagttcagccagttccggggcaagcttggtatcggcaacaaagcccggagtgaatggtcctgccagcacacccgctaacagatatcccaccagaggagaaatacgtagtttattggccagcatgccgaggataaaggcgagcacaaggccgccaacaatggtggtgataagcggggtggcgtgatgcattccgtctccttttcctggtggttattgtccatttttggccgggaaaaccaaaattacaggtaatagtttatgacaatttcattgatgatgttcatgaataattattgaattttgcagaaaaatggaattagctgcaaaaaaagcacggatcggaaaacagaaggcggtttaacagaggaaaggcttatggcgactgtaaaacgatgcagccaaagtttgcctttggctgcaatgaaatcagtctttatgccggttatcaggcaggaatatggtcaacatccccaatagtggcaggaaagcacagattttatagactaactcgatgctggtgtgatcggcgataagccccagaactgccgctcccagacctcccatgccaaaagcaaaaccgaaaaagagtccagaaaccataccgatacgtcctggaagcagctcctgagcgtagaccagaatggcagagaatgcgctagcgaggataaatccaataatcaccgttaaaacccccgtccagtgcaggctggcgtagggtaaaatcagcgtaaacggcgcaacgccgaggatagagccccaaatcacatatttccgcccaattttatcccctacaggcccgccgatcaccgtacctgccgcaacggcaaacaggaaggcaaacagatgaagctgagcattctggatagataatccgaatttttgcatcagataaaaggtgtaatagctgctgatgctcgccatatagaaatatttgctgaaaatgaggattaacagaatgctgaccgccagtacaactttattgcgcggcagtggattgataatcgtcgctttgggttttcctttattcattcggtgctgtgcgctgtaccaacggctgatttgcgccaacaccacgatcgccagcagtgccgcaagcacaaaccaggcaacgttgcctttgccataaggcgcgataatcaccgccgccagcaagggtcccagggaactgccaaagttgccgccgacctgaaagatagattgcgccaggccatgccgcccgccggaagccatacgggccacgcgagaagattccggatgaaagacgctactaccggtaccgaccagcgccgccgccagcagaactgcgccaaaactgcccgccagcgcaagcagcaccagaccgcttaaggtaaagcacatgccaattggcaagctccatggcatcggatatttatcggtccagtagccgaccactggttgcagtaggctagaggcgagctggaaggtgagggttatcatgccaatctgcataaatgtcagagaaaattcactctgaagcagcggataaatcgccagaatcaggctttggatcatgtcgttcagcagatgactgaggctgatagcacctaaaataccaaagcttgttcgggccttggtcgtactcgcagccgcgcccgccacaggctggggttgttcactcattgccataggaaagtcactttttcagggttgcgatgtaaagaatgatcttatttgtgattattaccagactaacatacctgtatgcgtcgtctgaaggaagtctcaacgccgaatacagaatttctaatctggatgcagatttatcttcaccggacgcagacttgtctatgatgtcgcgtcatactatttttcaacacgttgaaatcaggtcagggagagaagtatgaaattattgcagcggggcgtggcgttagcgctgttaaccacatttacactggcgagtgaaactgctctggcgtatgagcaggataaaacctacaaaattacagttctgcataccaatgatcatcatgggcatttttggcgcaatgaatatggcgaatatggtctggcggcgcaaaaaacgctggtggatggtatccgcaaagaggttgcggctgaaggcggtagcgtgctgctactttccggtggcgacattaacactggcgtgcccgagtctgacttacaggatgccgaacctgattttcgcggtatgaatctggtgggctatgacgcgatggcgatcggtaatcatgaatttgataatccgctcaccgtattacgccagcaggaaaagtgggccaagttcccgttgctttccgcgaatatctaccagaaaagtactggcgagcgcctgtttaaaccgtgggcgctgtttaagcgtcaggatctgaaaattgccgttattgggctgacaaccgatgacacagcaaaaattggtaacccggaatacttcactgatatcgaatttcgtaagcccgccgatgaagcgaagctggtgattcaggagctgcaacagacagaaaagccagacattattatcgcggcgacccatatggggcattacgataatggtgagcacggctctaacgcaccgggcgatgtggagatggcacgcgcgctgcctgccggaagcctggcgatgatcgtcggtggtcacagccaagatccggtctgcatggcggcagaaaacaaaaaacaggtcgattacgtgccgggtacgccatgcaaaccagatcaacaaaacggcatctggattgtgcaggcgcatgagtggggcaaatacgtgggacgggctgattttgagtttcgtaatggcgaaatgaaaatggttaactaccagctgattccggtgaacctgaagaagaaagtgacctgggaagacgggaaaagcgagcgcgtgctttacactcctgaaatcgctgaaaaccagcaaatgatcagcctgttaagtccgttccagaacaaaggcaaagcgcagctggaagtgaaaataggcgaaaccaatggtcgtctggaaggcgatcgtgacaaagtgcgttttgtacagaccaatatggggcggttgattctggcagcccaaatggatcgcactggtgccgactttgcggtgatgagcggaggcggaattcgtgattctatcgaagcaggcgatatcagctataaaaacgtgctgaaagtgcagccattcggcaatgtggtggtgtatgccgacatgaccggtaaagaggtgattgattacctgaccgccgtcgcgcagatgaagccagatagtggtgcctacccgcaatttgccaacgttagctttgtggcgaaagacggcaaactgaacgaccttaaaatcaaaggcgaaccggtcgatccggcgaaaacttaccgtatggcgacattaaacttcaatgccaccggcggtgatggatatccgcgccttgataacaaaccgggctatgtgaataccggctttattgatgccgaagtgctgaaagcgtatatccagaaaagcagcccgctggatgtgagtgtttatgaaccgaaaggtgaggtgagctggcagtaatccgaaagtgccggatgtttgcatccggcacaatgcttaatcgcggcgggcgatatcagcaaatttggcatcgaggatctttgccagatcgcctgccgccagttcgatatccagtccgcgcttgccgccggaaacataaatagtggcaaattcttgtgcgggggcgtcgataatcgttggcagacgttttttctgccccagtgggctaatccccccaaccaggtatcccgtgctacgctgcgcgaccatcggatcggccatctcaactttcttggcacccagcgcttttgctacttttttaagatccagttgacctgcgaccggcgtaacggccacggcaaggtgtttcatatcaccgttcactgccaccagcagcgttttgtagacctgatccggattcaaacctaattttttgacgacttcatcgccaaaattggtttcagccggatcgtgctcgtaggtatggatttgaaagctaatcttgttttttcgagtaatttaactgcgggtgtcatggtaattttcctgccttaaacaaaaaaacgaagcaagcatacgcctgatggcggtccaaaaaaaagagtcatcttgcctaagagtattggcaggatggtgagattgagcgacaatcgagttacaccgtcgcttaaagtgacggcataataataaaaaaatgaaattcctctttgacgggccaatagcgatattggccatttttttagcgcaacatttgcggcaaattcccttctccatacaggtgtagtgcaccgaccgcgaccacatatcgccccggcggcatggcgcgtaatttatcccgccaggcgagatttcgctgatgcatcagcacatcgtacaggctctgactgaacgtattgggcagcgttatatcattattttgcggcggtgcattcagccaccagctcatcatttgttgcagcaaccgtgcgttggtatgccagtgggtcagcgtatcgtccagcagcgccagtcctttgtcagggagctggagcaacatggcaatctggttttcagccccttccagttcaatcacgggtttatgttgttgcttcgccgcctgcaatagctggtaatcgataccgtattctgcccgcagccccagtttttgtgcctgcgtcgcctgaagaaccatcgcgatttgccacagcggttgggtagaaaagagactgggagaaatgcccatctcctggctaatgtgctgcaggttttggagttgctcctcgctaatgcgctcttccagcgcctcgcaggcaggcaaattagcaaaaggcgtatcgctggtggaaacatccgcctcgacgatcagcgcatcggcgtttttgagctttttgagcaaacgggtgggcaggggagccatatcgtggctacccatatgaatactgccaatcagatgaaaatggcgattgccggggagggtgatatcgatggcaggccaggtgtaatgattaccgcgcagcgcggcccaaagcgtttttacccggtacaacagatccatacgacctccctttgtgaaatatcatgctagcgcgcggtgagggatggcgcaaatggagttggagacttgtttaatgtgtttgtatgattcagtatgttcttgcatcgctattcacaaggaagcaacagttaaaaaccatgaaacaggcaacaagaaaaccgacgacacccggagatattcttctctatgaatatctggaaccgctcgatttgaaaatcaatgagttagcagagttgctgcatgttcatcgtaatagcgtcagtgcactgatcaataacaatcgtaaactcactactgagatggcatttcgtctggcgaaagtttttgataccacagtcgatttttggctaaacctccaggcggcggttgatctttgggaagttgaaaacaacatgcgcacccaggaagaattgggacggattgaaacagtggctgaatatttggcacgccgtgaagagcgtgcaaaaaaggtcgcgtaaggccaaaacatcgcttcatctcgtaggccggataaggcgttcacgccgcatccggcatccgagcaccattgcctgatgcgacgcttacccgtcttatcaggcctacaaacttgtgcctgaaccgtaggccggataaggcgtttacgccgcatccggcatccgagcaccattgcctgatgcgacgcttacgcgtcttatcaggcctacaaacctgtgcctgaaccgtaggccggataaggcgtttacgccgcatccggcagtcatgcgtcgatgccaaatgcgccaccctaaagcagcgcatccgcaatgatgtacttattccttcggtttaaaccgcagcaaccggttggcgttactcactacggtaatgctgctgagcgccattgccgctccggcaactaccgggttaagcagtgttccagtgaacggccacaaaataccggcggcgaccggaataccgatactgttgtagataaacgcaccgagcaggttctgcttcatgttgtgcagcgttgcgcgggaaatagcgagcgcatccgcaacgcccatcaggctatggcgcatcagggtaatcgccgcggtttcaatggcaacatcactgccgccacccatcgcaatgccgacatccgcctgagccagcgctggcgcgtcgttaatgccgtcgcccaccattgccacctaacgtccttcactttgcagatgtttgatcgcttcggctttaccgtccggcagcaccccggcgatcacctcatcaatccctgcttctttggcgatcgcattggcggtggttgggttatccccggtcaacatcaccagacgatatcccgctttatgcaggcgttgcagcgccgccacgctatcactacgcaacggatcgcgtactgccagcagggctaccgctttcccgtcaaccgccagcagcacaggcgttgccccttggcttgcctgagcagtaatctccgcttcgatagctttggtaccaacctgttgctcatttaacagcgcctgattgcccagcaataacgcatgaccttcagcttcaccgctcacgcccagcccgcgcaatgtgcggaaaccgttgacctgcggtagctgcatatcacctgctttatcgaggatcgctcgtgccagcggatggctggaaccttgctccagtgccgccgccagacgcaatgcctgcgcttcatcaacatcagcaaatgttttcactgcgacaacctgcggcttcccttcagtcagcgtcccggttttatcgaacactacagtgtcgagtgtactggcgcgttgcagcgcgtcagcgtcccgcaccagcacgccaaactcagccgcccgcccgacgccggaaataatgctcatcggcgtcgccagccccagcgcacacggacaggcaataatcagtaccgtggtggcaatcaccagggtatagacaatctgcggtgccggaccaaagaaataccagattgccgcactgacaagcgcaataaccaccactaccggcacaaatacggcactgattttatccgccagctgaccgatttctggcttgctgctctgggcctggcgcaccatgcgaatgattcgactcagcgtagtatggctgccaaccgcactggcacgaaacagcacactgccgtcctgtaccactgtcccggcatggacgctatcgccttcgcctttttgctgcgggattggttcgcccgtcagcatcgcttcatccagccatgcttcgccctgggtaatctcgccatctaccggcacgcgatcgccggtcgtcaggcgcagcaacatacctggctgcacttctgccagaggcacgcttttttcaccttcgtcagtaaccaggcgtgccgtcggcggggttaaatcgagtaacttttccagcgccttagaagaacgctggcgtgcgcgcgcttccagcatatggccgagattgatcagaccgataatcatcgcgctggcttcgtaataaagatgtcgcgcttccatcgggaaccactgcggccacaggttgacgctcatgctatagagccacgccacgccagtacccagcgccaccagcgtatccatcgtcgccgcaccgttcagcaggcttttccatgcactgcggtaaaaatggccgccggcgaaaaccatcactgccagggttatcaggccgataaccaaccacaggctgcggttgtcagcggtgaccatcatgttatcgccgatcatcccccagaccatcaccgggatacccaccgccagtgcgacaattgcctgccagcggaagcgcttcatcgtagcgacggcggtttcttgctggcgctcgcggcgtttagcgtcatcttcaatcgcttccgcgccgtagcccgctttttccaccgcctgcactaaatcttgtggggaggcactgcccatcaccagcgcagtacgctccgccaggtttacccgtgcctgagtgacgcccggtacgctttgcagcgcattttgtacgcgggtgacacagctggcgcagctcatgccgctcagcagcaactgctggctgtcatcgtcatcggcggtcgctgccggaagcgcctcagaaaccgctgtcagtgcttcgctcgggatactactctccgccagcggtttagcctttgggtggcttacagatgcgtcataacccgcttgtttgatggtttcgatcagctgttctgcactggcagtcccggtaacgtgcgcttcagtgatagacacatccgcctgctcaacatccggacgctgttcaagactttctttcacgcgtttaacgcagtgaccgcaggacaggccgtccagggtcaggtcgatagtttgactcataaaacactcctttaagacagttttgactggctgtgataaaggttaaaccttccagcaaggggaaggtcaagaaattaataaaccaggcgggtaaaagtccgtaaagattaaaaaatcggctcgatttgcatcaggattagacatttatctctttgttttcctgtagttaagttgcgggtgctaagttaaatcaggatgcctgaaaatcggcaccggggtgaggaattacctcccgcatctataaaaaggagttaacaaaagatgttagatgcaaacaaattacagcaggcagtggatcaggcttacacccaatttcacagtcttaacggcggacaaaatgccgattacattccctttctggcgaatgtaccaggtcaactggcggcagtggctatcgtgacctgcgatggcaacgtctatagtgcgggtgacagtgattaccgctttgcactggaatccatcagcaaagtctgtacgttagcccttgcgttagaagatgtcggcccgcaggcggtacaggacaaaattggcgctgacccgaccggattgccctttaacagtgttatcgccttagagttgcatggcggcaaaccgcttagcccactggtaaatgctggcgctattgccaccaccagcctgattaacgctgaaaatgttgaacaacgctggcagcgaattttacatatccaacagcaactggctggcgagcaggtagcgctctctgacgaagtcaaccagagcgaacaaacaaccaacttccataaccgggccatagcctggctgctgtactccgccggatatctctattgtgatgcaatggaagcctgtgacgtgtatacccgtcagtgctccacgctcctcaatactattgaactggcaacgcttggcgcgacgctggcggcaggtggtgtgaatccgttgacgcataaacgcgttcttcaggccgacaacgtgccgtacattctggccgaaatgatgatggaagggctgtatggtcgctccggtgactgggcgtatcgtgttggtttaccgggcaaaagcggtgtaggtggcggtattctggcggtcgtccctggagtgatgggaattgccgcgttcagtccaccgctggacgaagatggcaacagtgttcgcggtcaaaaaatggtggcaagcgtcgctaagcaactcggctataacgtgtttaagggctgatcatgatgaacacggaaggtaataacggtaacaaacctctcggtctatggaacgtcgtttccatcggcattggggcaatggtgggggcggggatcttcgcgctgctggggcaggctgcattgctaatggaagccagcacctgggtcgcctttgcttttggcggtattgtggcgatgttttccggttatgcctatgcgcgtctgggggcgagctatcccagcaatggcggcattatcgacttctttcgtcgcggattaggcaacggcgtctttagcctggcgctcagcttactgtacctgttgacgctggcggtgagcatcgccatggtcgcccgtgcttttggcgcttatgccgtgcagtttttgcatgaaggcagccaggaggagcaccttattttgctctacgcgttggggatcattgcggtgatgacgcttttcaactccttaagcaaccatgcggtagggcggctggaagtgatcctcgtcggcattaaaatgatgatcctgttattgctgattattgccggtgtctggagcctgcaaccggcgcatatttccgtctctgcgccccccagctccggtgcgttcttctcctgtattgggataactttccttgcctatgcgggctttggcatgatggcgaacgcggcggataaagtgaaagatccgcaggtcattatgccacgggcgtttctggtggcgattggcgttaccacgttgctttatatcagcctggcactggttttgcttagcgatgtaagcgcattagagttagaaaaatatgccgataccgccgtagcgcaggctgcttctccgctgctcgggcatgtgggttatgtgatcgtcgtcatcggcgctttactggcgacggctagtgccattaacgcgaacctgttcgccgtgtttaacatcatggacaacatgggcagcgaacgcgaactgccgaagctaatgaataaatccctgtggcggcagagtacctggggcaacattattgtcgtggtgttgattatgctgatgacggcggcactgaatttaggcagtctcgccagcgttgccagcgccacctttttgatttgctacctggcggtgtttgtggtggcgatccgcctgcgtcatgatattcacgccagcttgccgattcttatcgttggtacgttggtgatgttgttggtgatcgttggctttatctacagtctgtggtcccagggtagccgtgcgttgatatggattattggcagtctcttactcagccttattgtggcaatggtcatgaagcgcaataaaaccgtataacatctctctgtgcgcagtacttcctgtattattgtggtggcggtcgatattcgcactggcaaaaaaacgtgcttgaatatctgttgaaaccctttaacaaagcacaggaggcgttgcgcgaacgatgaacatcagcgatgtagcaaaaattaccggcctgaccagcaaagccattcgcttctatgaagagaaggggctggtgacgccgccgatgcgcagcgaaaacggttatcgcacctacacgcagcagcatctcaacgaactgaccttactgcgccaggcacggcaggtgggctttaacctggaagagagcggcgagctggtgaatctgtttaacgacccgcagcggcacagcgccgacgtcaaacggcgcacgctggagaaggtggcggagaacgaacgacacattgaggagctgcaatccatgcgcgaccagctgctggcactggcgaatgcctgccctggcgatgacagcgccgactgcccgattatcgaaaatctctccggctgctgtcatcatcgggcagggtgattaagagctgacggctcggatatgtagggttatcccttctatcgcaatgacttcaacatgcgtacctgcaccgagatcctcgctggcgctgacaggccaactactgtcaccgacgcgcatatgaccgcgcccgttgaccagcggagattccagcacaaaacgtcggccaatcagctgctgcccgcgctggtttaaatgactatcgctgtgcttttgttcgcgcacccgccggctcaaccatttccaccacagccaggcggcgagcagcgtcaggatggcaaacattaccccttgccactcccaacccagcggcaccagccagaccaccaggccggtaatcaccgctgccacgccgctccacaacaaataaccatttccgcccagcatctcggctgccagcagcaaaccgccgagactgagccagaaaatatgtggatgaacgaccattaactccatcatggctgagtccgtttgttggcgctgtctttcaccagctcggcaatcccggcaatgctccccatcaggctgctggcctctaatggcatcatcactactttgctgttactggaggaaccgatctgctgtaacgcttcggtgtatttctgcgctacgaagtagttcaccgcctgaatatcaccggaggcgatagcttcagacaccattttggtggcgcgggcttctgcttcggcggaacgttcacgcgcttcagcctgtaaaaacgcgctctgacgttcgccttccgctttcaggatttggctctgtttttcaccttcggctttgaggatttccgcctgacggatcccttccgcttcaagaatgtaagcgcgtttggtacgttccgctttcatctgcgcgttcatactagagataagctctgccggtgggcgcacgtcgcgaatttcaatacgggtgactttaatcccccacgggttggtggcttcatcgacaatacgcagcaggcgactgttgatgctgtcgcgctgagagagcatttcgtcaagttccatactacccagcacggtacggatgttagtcatggtcaggttgatgatcgccagctccagattgctgacttcataagccgcgcgcggcgcgtcaatcacctgaataaagcacacggcgtcgatggtaacgttggcgttatctttgctgataacttcctgggaagggatatcgagcacttgctccatcatattgatcttgcgaccaatgcgatccataaacggcaccaccagactgagccccggctgtaacgttttggtatagcgaccaaagcgttctactgtccactgatagccctgcggtacgattttgacacccgcgccgacaatgaccagcgcgacaaaaatgagaatcgggataaagataagcatcggaaaaacctcctgttgtaccgtccataatcagcaaaattgctgcttgattaaacaaattatacctgattactgaaagagagttcccccttattcctgcgaaggataaactgtttttagtaaaaatcagaaaaagggaacagcgatgcaggaaaatagtcctttgcttcagctacaaaacgtaggatatctggcgggtgatgcgaagattcttaataacatcaattttagcctgcgtgctggcgaatttaagttaattaccggtccttctggttgtggcaaaagtacgctgctaaaaatagttgctagtttgatcagcccaaccagcggaacgttactgtttgaaggtgaggatgtcagcacactaaagccagaaatctaccgccaacaagtctcttactgcgcccagacaccgacgctgtttggcgatacggtatacgataatctgatctttccctggcagatccgtaaccggcagcctgacccagccatttttctcgattttctcgaacgcttcgccttgccggacagcattttgacgaagaatatcgccgagctatctggtggtgaaaaacaacgcatcagtttgattcgtaacctgcaatttatgccgaaggttttattgctggatgaaataaccagtgcgctggatgaaagtaataaacataacgtcaatgagatgatccatcgttatgtgcgcgagcaaaatattgccgtgctgtgggtgacacacgataaagacgaaattaatcatgcggataaagtgattacactgcaaccgcatgccggagaaatgcaggaagcacgctatgaactcgcataactaaagaaatgcaggaagcacgctatgaacagccataatattactaacgaaagtttagcactggcattaatgctggtggtggtggcaatcttaattagccataaagaaaaactggcgctggagaaaaatattctctggagcgtcgggcgagcgataattcagctgattattgtcggctatgtgctgaagtatattttcagcgtggatgatgccagcctgacattattgatggtgttatttatctgctttaatgcggcgtggaacgcgcaaaaacgcagtaaatatattgctaaagcttttatcagtagctttattgccattacggtcggggcgggaattaccctggcggtgctgattctcagtgggagcattgaatttatcccgatgcaggtgatccctatcgccgggatgattgccggtaacgccatggtagcggtggggttgtgttacaacaatttagggcaacgggtcattagcgaacagcaacagattcaggagaaactgagtcttggtgcgacgccgaagcaggctagtgcgatattgattcgcgacagtattcgcgcggctttaattccgacggtcgatagtgcaaaaacggttggcttagtgagtttaccaggaatgatgtccgggctgatatttgccgggattgatccggtgaaggcgattaaatatcagattatggtgacctttatgctgctcagtaccgccagcttgagcaccattattgcctgctatttaacctatcgtaagttttataatagccgccaccagttggtggtgacgcaattgaagaagaaatgatgcgatgccggatgcgcagcatcgcatccggcgttgtggttcatgtgccgatcaacggaatatcaatacaacaatgcatacagctggcggcgatacttgctcgccagtgcatcacccgtacccagcgcagcgaggatctcctggaacgttttacgcgtctgaccgtctgcggcggtgagatctttacgcagatgcccgaacagcaactccagcgcctcttcattgcgcccaacctgatgcagttgcagcgccagttgcgtcgccagtgcggcatcttctggattctccgccacctgctgttgcaactgttgaatttccggcgtatcagccgcctgcttcagcagttcgatttgcgccaccagcccctggtagcgggtgtcctgatcctgcaacggaatggttttcagcaccgcttccgcatcttcagaacggttcagcgcaatcagcgtttctgccagcagcaggccgatctccccgttctgattgctcaactgccaggcgtctttcagcaatggcagggcatcggtgtaattgctttcctgcatcagttgcatcgcctgctgcgctttcagctcttcttcgcgcggcagcactttatccagcagggcgcggatcgcctcttccggttgcggcccctggaagccatctaccggttgcccgttctggaacagatacacggtcggaatcgcacgcagaccaaactgcgcggcaatcatctgctccgcgtcgcagtccagcttcgccagaataaattgcccgttgtactgcgccgcgaggctttccagaattggggttaactgcaaacagtgctggctacgttcagaccaaaaatagaacagcaccggagtggtcatgctctgttcaagaacctgttgcaggttagattcgttaatgttgacaatattttctacggacatggagtcgctctctgttgtcgatattttctttgacatgggggcttaagcgcgcgcttcaactcacccctgcaatattttgtccatcacgcgccccggcagcaggcgcttaagcaccattaccgcccaggtcaccagcgtcaccggatagcgcatcttcggcttctcgctaataaaagcatggcgtactttgtccaccaccgcttccggtcccaacgtaaagcgggcggcgatgccgggattttcgactggtttatcactttgcgtctggttgacgttgtcggtgaagcgagtacgaatgggaccgggttcgatcaggctgactttaattccgctgtggcgcagctccatgcgcagtgcatcactccacgcctccagcgcatatttactggccgcgtaagcgccacgacccggcgtggagattaatcccatcacgctacttgtcatcacaatacgcccttcaccgtgcggtaacatcgcgggtaacaggcgcatggtgagctggtgtgcgccgaaaaagttggcggaaaactgctgttccatctgcgcacggctgatggtggaaagggggccatacatgccgaatccggcattgttaaagatcccatacagacaattatcggtcagggcgatcacctcgtcggctgcgcgatcaacactttctggactatccagatcgatcaacacgccggtaaatcccatgctgttcatgcgctcaacatcatccggtttccggcaacctgccagcacatgaaaaccctggcgttttaattcgagcgcgctttccaggccaattccactggaacatccggtaattaagacgcttttttgcataactttacctgtcaggatctccgttgctttatgagtcatgatttactaaaggctgcaacttatttaactgtcatgatttactaaaggctgcaactgcttcgccatccagtcggcaataaacggctgggcgtcgcggttgggatgaataccgtcatcctgcatccattgtggcttgaggtagacctcttccataaaaaagggcagcagcggaacatcaaactctttggcgagtttggggtaaatggcgctaaaggcttcattataacggcgaccatagtttgcaggcagacgtatttgcattaacaatggttcagcgttggcggctttgacatcctgcaaaatctggcgcagcgtttgctcggtttgctgtggctgaaaaccacgcaaaccgtcattgccgcccagttcaaccagcacccaacgcggctgatgctgtttcagcagagccggaaggcgcgccagtccttgttggctggtgtcgccgctgatgctggcattaactacgctcgttttactctgccacttatcattcaacaaggcaggccaggccgcgctggcagacattcgatacccggcgctcaggctatcacccagaatcaataacgtgtccgctgcggcggcacggaaggttaacaggaccaggaacaggaagggcaaatgccagcggaaaacattgttgaagttcatcatcttaagaagtccgtcggtcagggggagcatgaactctccatcctcaccggagttgagctggttgtcaaacgtggcgagaccatcgcactggtgggcgagagcggaagcggtaagagtaccttgctggcgatcctcgccgggcttgatgacggcagcagtggcgaagtgagtctggtgggacaaccgctacataatatggacgaagaagcgcgggcaaagttgcgcgcgaagcacgtcggctttgtttttcagagttttatgttaattcctacccttaacgcgctggaaaacgtcgagcttccggctctgctgcgcggtgagagtagcgcggaaagtcgtaacggggcgaaagcgttgctcgaacagttagggctgggtaaacgtctggatcatcttccggcacagctttccggcggtgaacagcaacgagtggcgctggcacgagcctttaatggtcgacctgatgtgctgtttgccgacgaacccaccggcaaccttgaccgccagacgggcgataaaattgccgacctgctgttttccctcaaccgtgaacatggcaccacgttgattatggtgacccacgacctgcaactggcggcacgctgcgaccgctgcttacggctggtgaacgggcagttgcaggaggaagcatgattgcacgttggttctggcgcgaatggcgtagcccgagcctattaattgtctggctggcgctaagcctggcggtggcctgcgtgctggcgctgggcaatatcagcgatcgcatggagaagggcttaagccagcaaagccgtgagtttatggcgggcgatcgggcgttgcgcagtagtcgcgaagtgccgcaagcgtggctggaggaagcgcaaaagcgcggcctgaaagtcggcaagcagctgactttcgccacaatgacctttgcaggcgacacaccgcagctggcgaacgtcaaagcggtggatgatatctacccgatgtatggcgatctgcaaactaatccccctggcctgaaaccgcaggcgggcagcgtattgctggccccacgcctgatggcactgcttaacctgaaaacgggcgacaccattgacgtgggcgatgccaccttgcggattgccggagaagtgattcaggaaccggattccggttttaaccccttccagatggctccgcgtctgatgatgaatctggcggatgtcgataaaaccggagccgtgcagccggggagtcgggtcacctggcgttataaattcggcggcaacgagaaccagctcgacggctatgagaaatggttgttacctcagcttaaacccgaacaacgctggtacggtctggaacaggacgaaggcgcgctggggcgaagcatggaacgcagccaacagttcctgctgcttagcgcgcttctgaccttgctgctggcagtggcagcggtggcggtagcgatgaatcattactgtcgcagtcgctacgatctggtggcgatcctcaaaacgctgggggcagggcgagcgcaactgcgtaagctaatcgtcggtcagtggttgatggtgctgacgcttagtgccgttaccggtggggccataggcctgttgttcgaaaacgtgttgatggtgctgctcaagcccgttctgcctgctgcactaccgccagccagcctctggccgtggctgtgggcgcttggcaccatgacggtcatcagcctgctggtggggctacgaccatatcgcttgttgctggcaacgcagcctttacgcgtattacgtaatgatgtggtagcgaacgtctggccgctgaagttttatctgccgattgtcagtgtggtggttgtgctgctgctcgccggattaatgggtggcagcatgctgctttgggcggtgctggcgggcgcggtagtactggctttgctgtgcggtgtgctgggctggatgctgctgaatgtacttcgccgcatgacgctgaaaagcctgcctctgcgcctggcggttagccgcctgttacgtcagccgtggagtacgttaagtcagcttagcgcatttagcctctcctttatgctgctggcactgctgctggtgttgcgtggcgatctgctcgaccgctggcagcagcagctacctccagaaagcccgaactactttttaattaacatcgccacagaacaggtagcaccgctaaaagcgttcctcgcggaacatcagatagtcccggaaagcttttatccggtggtgcgggcgcggctgacggcgattaacgataagccgacagaaggtaatgaagatgaggcgcttaaccgcgaactcaatcttacctggcaaaatacgcggcccgatcataatccgattgtcgccggtaactggccgccaaaagccgatgaagtgagcatggaagaggggctggcgaaacgcttaaacgttgccctcggtgataccgtgacttttatgggcgatacccaggagttccgcgctaaagtgaccagcctgcgcaaagtggactgggaaagtctgcggcctaatttctattttattttccctgaaggggcattagacgggcaaccgcagagctggcttaccagtttccgctgggagaatggcaacggcatgttgacacaactcaaccgccagttcccgaccattagcctgttagatattggcgcgattttaaaacaggtcggtcaggtgctggagcaggtaagtcgggcgctggaagtgatggtggtactggtcaccgcctgcggtatgttgctgttgctggcacaggtgcaggtgggaatgcgtcagcgtcatcaggagctggtggtgtggcgcacactcggtgcggggaaaaaactgctgcgtaccacgttgtggtgtgagttcgccatgcttgggtttgtttccggcctggtggccgcaattggtgcggaaacggcgctggcagtgttgcaggcgaaagtgtttgattttccgtgggagccagactggcgattgtggattgttctgccgtgcagcggagcgctgctgctgagccttttcggcggctggctgggtgcgcgactggttaagggtaaggcgctgttcaggcagtttgcggggtgatgagagtccctcattaccgcgccttaacccattccgccacttccgcccactcaccgcgaaagacaactttttccgcttttttctcaagctgatagcgatacatcgggtcgtaatattcttcaagtaacggcaccagccaggccagatgaccgtcggtgctgccggtggtgagttgcgttgtcagtgctgcatccagccttgcagccagttcgttatagcgctgtagccccagccgacgcttaatcgcgctaagtccgtgatgcaggtattcgcaatactcctgccagccctgttcgtcgccgtacgcgtgggtaaaatcatgatgcatacgcaagaaatactcttcgttcaggcgctcaagacggatctcaaacggatcttctaccaccgcaatcgccgcctgagtcattcgctcgcgcaggcattccggcaggtgattgctaccgatcatccggctttcgtcttccagcacccacaggcgcaaattctgacgggcgtcggtttttagcatttcggcagccagcaggttttcaaaactcgcctggctaagttgtggttgtaacgtgcgaccaaacgcgctaccgcgatgacgcgccaacccttccagatcaacaccgttcggctgttgctgcactaacagcgttttaccgctgccggtacaaccgccaatcagcactatcggtttttgtgccagttcaatagtcgcctgaatcgcggtctggcgcagtgccttataaccgccttccaccagcggataatcaatccccgctgcatgcaaccagctttgcacaatatgactgcgctgaccgccacgggcgcagcagagaataccttgcggattttgcaggcacgctgcccgccaggcgtccatgcgctgctgacgaatttcacccgccaccagtttatgtcccagcgccagcgctgcgtcactgccttgctgtttatagcaggtgccaacggcggcgcgttcatcgttattcattaacggcagattgatagcggcgggcattgcgccgtgctcaaactcgataggggcgcgaacatcaataatgggcgtatcagcaatcagcagggcacgatagtcctgttccgtgtgtctctcttgcatagttaaaagtgaacctcaaatcagcttgcgcgctattttacgcgccaacgcgcaaggaaacttgatttttaactgcgtgggttgccgaaaatttctaaaaatccgctgatttccggcctgcgctgggtaaacaaggtcacaatatcttctaccgctttgccgctgccaaatttgcgccatgccagactcaatgggctaggagggcgcatcgttgggattacccggctgaccagttgttgattatcgatcatactctggcaaaggctttttggcaaaaaaccaatgccaacgcccgccagatgggcggcgattttcgtttccatatcgggaacaataatctctttttgccctggcaatcgccaggcgacgcgtttggttaaggtgcgggcgctgtcttcaatattgaccgccggaaagcgccgcaactgcgcttctgttagcggctcttcaacgttcgccagcggatgatccgccgccatgacaaagcgccattgcacgcttcctaagggatcaagactaaaggtatttgccagcgcctcagttcccgtgacgccgatagccaggctaaaaccttcgtacaataggctgtcccagacgcccatatagatttgtcgggagatgtgaaactgggtaaaggggtaacgctcattcagccacgccagcaactgggcgacggcctgggggttatagagcaggttgttgatgacaatattcacctggcgttccacgccatcattcacctgttgcagctcgcttggcatactttccagccagctcagccagtctctggcctgggaaagtagatgctcgccagccgctgtcaacgtcacgctgcgagtcgtacggaaaaacagcgctactccggtattctcttccagaagtttaatgcgataactgatcgtcgccgtggttttacataatcgttctgccgctttactaaaacttcctgtttcagcaaccgcaatgaaagtccgcaaggtttctggatcgaacatcttcaggtatccccttttaaatccgcaagttgcgtgattttcttatcctctgatttatcagtatttttacatgataaccctgttcaatttgtggactaaatctagttttggaaaaatattccaacttttgtattgatgttgttctcttaaggttttagattgcctgttattgaaaccaagctgaccggtcggcggtggttgaacggaattatgttacaaggacaaaaagatgaaacttcaggtattaccgttaagtcaggaagcctttagtgcttatggcgacgtaatcgaaacgcagcaacgggattttttccatattaacaatggcctggtggagcgttaccacgatttggcgctggttgagattcttgagcaagactgtacgcttatcagcattaaccgcgcgcaaccggcgaatctgccgctgaccattcacgaactcgaacgtcatccgctgggtactcaggcctttatcccgatgaaaggtgaggtgtttgtggtggtcgtggcgttaggtgacgacaaaccagacctgagtacgctgcgggcgtttatcaccaacggcgaacagggagtgaattaccatcgtaacgtctggcatcacccacttttcgcctggcagcgcgtcaccgattttctgaccatcgatcgcggcggcagtgacaactgtgatgttgaaagtattcctgaacaggaactctgttttgcgtgacgcctgcaaccgacttgcataagataaactaattgttcattgtttatgctcacttgtaggtcggagttaacgtaggtatgacggaagttagacggcgcggcaggccaggacaggcggagcctgtggcacagaagggcgcacaggcgttagagcggggaattgcgattctgcaatatttggaaaaaagtgggggaagtagcagcgttagcgatatttctctcaatctggatttgccgctctccacgacctttcgcttgctgaaggttttacaggcagcggattttgtctatcaggacagtcaattaggctggtggcatataggattaggtgtctttaacgtcggtgcggcgtacatccataaccgcgatgtcctctccgtcgccgggccgtttatgcgccgcctgatgttactttccggcgaaacggtcaatgtcgcgatccgtaacggcaatgaagcggtattaattggtcagttagagtgtaaaagcatggtcaggatgtgtgcgccactgggcagtcgtctgccactgcatgcttccggtgcgggcaaagcgctgctttatccgctggcggaagaggagttgatgagcatcattctgcaaaccggtttgcagcagtttacgccaactacgcttgtggatatgcccaccttgctgaaggacctggaacaagcgcgtgaactgggctataccgtagataaagaagagcatgttgtaggtctgaattgcatagctagtgcaatttacgatgatgtcggtagtgttgttgccgctatctccatctccgggcctagtagtagactgacagaagatcgttttgtcagtcagggtgagctggtcagagacaccgcccgcgatatcagcacggcgttgggactgaaagcacatccataatgtctgtcgcatcccgctctgcggagcgggtttttttgacaaaatttgaaagttggaaaaattttccaataaatagaggtaggaataaaatggcaaaaatgagagccgttgacgcggcaatgtatgtgctggagaaagaaggtatcactaccgccttcggtgttccgggagctgcaatcaatccgttctacagtgcgatgcgtaagcacggcggtattcgtcacattctggcgcgtcatgtggaaggtgctagccacatggcggaaggttatacccgcgcaacggcagggaatatcggcgtatgtctggggacttccggtcctgcgggcacggacatgatcaccgcgctctattccgcttctgctgattccattcctattctgtgcattaccggccaggcaccgcgcgcccgtctgcataaagaagattttcaggccgtagatattgaagcaattgctaaaccggtcagcaaaatggcggttacagttcgtgaagcggcgctggtgcctcgcgtgctgcaacaggcatttcacctgatgcgttctggtcgtccgggtccggtactggtggatttaccgttcgacgttcaggttgcggaaatcgagtttgatcctgacatgtacgaaccgctgccggtctacaaacctgctgccagccgtatgcagatcgaaaaagctgtagaaatgttaatccaggccgaacgtccggtgattgttgccgggggcggggtaattaatgctgacgcagctgcactgttacaacagtttgctgaactgaccagcgttccggtgatcccaacgctaatgggctggggctgtatcccggacgatcatgaactgatggccgggatggtgggtctgcaaaccgcgcatcgttacggtaacgcaacgctgctggcgtctgacatggtgtttggtatcggtaaccgttttgctaaccgtcataccggcagcgtagagaaatacaccgaagggcgcaaaatcgttcatattgatattgagccgacgcaaattggtcgcgtgctgtgtccggatctcggtattgtctctgatgctaaagcggcgctgacactgctggttgaagtggcgcaggagatgcaaaaagcgggtcgtctgccgtgtcgtaaagaatgggtcgccgactgccagcagcgtaaacgcactttgctgcgcaaaacccacttcgacaacgtgccggtgaaaccgcagcgcgtgtatgaagagatgaacaaagcctttggtcgcgatgtttgttatgtcaccaccattggtctgagtcaaatcgctgcggcacaaatgctgcatgtctttaaagaccgccactggatcaactgtggtcaggctggtccgttaggctggacgattccggctgcgctaggggtttgtgccgctgatccgaaacgcaatgtggtggcgatttctggcgactttgacttccagttcctgattgaagagttagctgttggcgcgcagttcaacattccgtacatccatgtgctggtcaacaacgcttatctggggctgattcgtcagagtcaacgcgcttttgacatggactactgcgtgcaactcgctttcgagaatatcaactccagtgaagtgaatggctacggtgttgaccacgtaaaagtagcggaaggtttaggttgtaaagctattcgggtcttcaaaccggaagatattgcgccagcctttgaacaggcgaaagccttaatggcgcaatatcgggtaccggtagtcgtggaagttattctcgagcgtgtgaccaatattagcatgggcagcgaactggataacgtcatggaatttgaagatatcgccgataacgcagcggacgcaccgactgaaacctgcttcatgcactatgaataagggagataaataatgttacgtttctctgctaatttaagcatgttatttggagaatatgattttctcgcccgttttgagaaagctgcgcagtgtggttttcgcggcgttgaatttatgtttccttatgactacgacattgaagaattaaaacatgtgctggcgagtaataaactcgaacatacgctgcacaatttaccggcgggtgactgggcggcgggggagcgcggtattgcctgtattcctggccgtgaagaagagtttcgggatggcgtagcagcagcgattcgttatgcccgtgcgctgggtaataaaaaaattaactgtctggtcggtaaaacgccggctggtttcagcagtgaacagattcacgcaacgcttgtagaaaacctgcgttatgccgcgaatatgctgatgaaagaagatattttattactgattgaacctattaaccattttgatattcctggtttccatctcaccggaactcggcaggcgctgaaattgattgatgatgttggttgctgcaatttgaaaattcagtatgacatttatcatatgcagcggatggaaggtgaattaaccaacaccatgactcagtgggctgataaaattggtcacctgcaaattgccgataatccgcatcgcggcgaaccgggaaccggagaaattaattatgattatctctttaaggtaatcgaaaattctgactacaacggttgggttgggtgtgaatataaaccccaaaccaccacggaagccggtttacgctggatggatccgtaccgttaaaacgtaacgctattcagacaatgcttttttaggccgctaagttggcaggggatcgtgttgtctgaattcaggaaaagcgaaatttaaaagaggttaattatgaaactgggatttattggcttaggcattatgggtacaccgatggccattaatctggcgcgtgccggtcatcaattacatgtcacgaccattggaccggttgctgatgaattactgagtctgggtgccgtcagtgttgaaactgctcgccaggtaacggaagcaagcgacatcatttttattatggtgccggacacacctcaggttgaagaagttctgttcggtgaaaatggttgtaccaaagccagcctgaagggcaaaaccattgttgatatgagctccatttccccgattgaaactaagcgtttcgctcgtcaggtgaatgaactgggcggcgattatctcgatgcgccagtctccggcggtgaaatcggtgcgcgtgaagggacgttgagcattatggttggcggtgatgaagcggtatttgaacgtgttaaaccgctgtttgaactgctcggtaaaaatatcaccctcgtgggcggtaacggcgatggtcaaacctgcaaagtggcaaatcagattatcgtggcgctcaatattgaagcggtttctgaagccctgctatttgctagtaaagccggtgcggacccggtacgtgtgcgccaggcgctgatgggcggctttgcttccagtcgtattctggaagttcatggcgagcgtatgattaaacgcacctttaatccgggcttcaaaatcgctctgcaccagaaagatctcaacctggcactgcaaagtgcgaaagcacttgcgctgaacctgccaaacactgcgacctgccaggagttatttaatacctgtgcggcaaacggtggcagccagttggatcactctgcgttagtgcaggcgctggaattaatggctaaccataaactggcctgatacccgcaataaaaatggccgatatcagaaaatgaatcggccagcaatattaaaaaagaaagcagccaaagatgttgctagtgtattaaaaataatatttttattttatttgttcctcatagctagattaaaacaacgttatagcatacgtgaaattaagagggatttatggaacatcagagaaaactattccagcaacgcggctatagcgaagatctattgccgaaaacgcaaagccagcggacctggaaaacatttaactattttaccttatggatgggtagcgttcataacgttcccaattatgtgatggtcggcggcttttttattctcggcttgtctacctttagtattatgctggcaattatcctcagcgcctttttcattgccgcggtaatggtattaaacggtgctgcgggcagtaaatacggtgtgccttttgccatgatcctgcgtgcttcttacggtgtacgtggtgcactgtttcccggattattaaggggcggaattgccgccatcatgtggtttggtttgcaatgttacgcggggagtctggcctgcttgattctgattggcaaaatctggccgggatttttaactctcggtggtgatttcactctgttaggcctttctctaccgggcttaattactttcttaatcttctggctggtcaacgttggtataggttttggcggtggcaaagttttaaataaattcactgccattcttaacccgtgcatctatatcgttttcggcggtatggcgatttgggcgattagtctggtcgggatcggtccaatctttgactacattccgagcggtattcagaaagcagaaaacggtggcttcctgttcctggtggtgattaacgcggtagttgcggtctgggcggcaccggcggtgagcgcatccgactttacgcaaaacgcccacagctttcgtgagcaggcgctggggcaaacgctgggtttagttgtggcctatattctgtttgcggtcgccggggtatgtattattgccggagccagtattcactacggcgctgatacctggaacgtgctggatattgttcagcgttgggacagcctgttcgccagcttctttgcggtactggttattctgatgacaactatctccactaacgcgaccggtaatattattccagccggttatcagattgccgccattgcaccgacaaaactgacctataaaaacggcgtactgattgccagtattatcagcttgctgatctgcccgtggaaattaatggaaaatcaggacagcatttatcttttcctcgatattatcggcggaatgcttggtccggtaattggtgtcatgatggcgcattattttgtggtgatgcgcggacaaattaatcttgatgaactgtataccgcacctggcgattataaatattacgataacggttttaacctcactgcgtttagtgtaactctggtggccgttattttatctcttggcggtaagtttattcactttatggaaccgttaagccgtgttagttggtttgtcggcgtcatcgtcgcctttgcggcctacgccttattaaagaaacgtacaacagcagaaaaaacaggagagcaaaaaaccataggttaattaatcccgatattgaacattgagttaaaaaccaatctgtattttacaaggagtttgttatgtcttttgatttaatcattaaaaacggcaccgttattttagaaaacgaagctcgcgttgtagatatcgccgttaaaggcggaaaaattgctgctatcggtcaggatctgggcgatgcaaaagaagttatggatgcgtctggtctggtggttagcccgggcatggttgatgcgcacacccatatttctgaaccgggtcgtagccactgggaaggttatgaaaccggtactcgcgcagcggcaaaaggtggtatcaccaccatgatcgaaatgccgctcaaccagctgcctgcaacggttgaccgcgctagtattgaactgaagttcgatgccgctaaaggcaagctgactattgatgcggcacaactcggtggcctggtgtcttacaacatcgaccgtctgcatgagctggatgaagtgggcgttgtcggcttcaaatgcttcgttgcgacctgtggcgatcgcggtatcgacaacgacttccgtgatgtaaacgactggcagttcttcaaaggtgcgcagaagctgggcgaactgggtcagccggtgctggtgcactgcgaaaacgcgctgatttgtgacgaactgggcgaagaagcgaagcgtgaaggtcgcgtaaccgctcatgactatgtggctagccgtccggtatttaccgaagtggaagcaattcgccgcgtactgtatctggcgaaagttgctggttgccgtctgcacgtttgccacgtcagcagcccggaaggtgttgaggaagtgactcgtgcacgtcaggaaggtcaggacgttacttgtgaatcctgcccgcattactttgtactggataccgatcagttcgaagaaatcggtactctggcgaagtgtagtccgccgatccgcgatctggaaaaccagaaaggcatgtgggaaaaactgtttaacggtgaaatcgactgcctggtttccgaccactctccatgcccgccggaaatgaaagccggtaacatcatgaaagcatggggcggtatcgccggtctgcaaagctgcatggacgtgatgttcgatgaagcggtacagaaacgcggtatgtctctgccaatgttcggcaaattaatggcgactaacgcagcagatattttcggtctgcagcaaaaaggccgtatcgccccaggaaaagatgccgacttcgtcttcattcagccgaatagcagctatgttcttaccaatgacgatctggaatatcgccacaaagtcagcccgtatgttggccgtaccattggcgcgcgtatcacgaaaaccatcttacgtggtgatgtgatttacgacattgaacagggcttccctgttgcgccgaaaggtcaatttatccttaaacatcagcagtaatctggcccctgcaatgcccgtccttgcggcgggcattctccggttaaggtgtgtttatgttcaattttgcagtcagccgcgaaagcctgttaagtggatttcagtggtttttctttattttttgcaacacggttgtggttcctcctacgctactttctgcttttcagttgccgcaaagtagcctgcttacgctcacgcaatatgcttttcttgctaccgcactggcctgcttcgctcaggcgttttgcggtcatcgtcgcgctattatggaagggccaggtggcctgtggtggggaaccatccttactatcacccttggtgaagcaagccgcgggacaccgatcaacgatatcgccaccagcctggcagtggggattgcactctccggcgtgctgacgatgttgattggttttagcggattaggccatcgcctggcacggttatttacgccgagcgtgatggtcttgtttatgttgatgctgggcgcgcagctgaccactatctttttcaaaggtatgctcgggctgccgtttggcatagccgacccgaattttaaaattcagttaccgccgttcgcgctcagcgtggcggtgatgtgcctggtactggcgatgattatcttcctgccgcaacgttttgcccgttatggcctgctggtcggcaccataaccggctggttgttgtggtacttttgctttccttctagccacagcctctccggtgagttgcactggcagtggttcccgctcggcagtggcggtgctttgagcccgggaattattctgacggcggtgattacaggtctggtaaatatcagcaatacctacggtgcgattcggggcacggatgttttttatccgcagcagggcgcagggaatacgcgttatcgtcgtagctttgtggcgaccggatttatgacgctgataaccgtaccgctggcggtaattccatttagtccgtttgttagttccattggtttattaacccagactggcgattacacgcggcgtagctttatttatggcagcgttatttgcctgctggtggcgctggttcctgcactcacgcgactgttttgcagtatccctttacccgtgagtagtgcggtcatgctggtttcttatctgcctttactcttttccgcgctggtgtttagccagcaaataacgtttaccgctcgcaatatttatcgactcgcattgccgttatttgtcggcatatttttaatggcattaccgcctgtgtatctgcaagaccttccattaacgcttcgtcctctgctcagtaacggcttattggtcgggattttactggctgttcttatggataaccttattccgtgggaacgcatcgaataatttgttgaaaaaggattgataatgaagattgtcattgcgccagactcttttaaagagagcttaagtgcagaaaaatgttgtcaggcaattaaagccgggtttagcaccctctttcccgatgcgaactatatctgtttgccgatagcggatggcggcgaagggacggtggatgcgatggtcgccgcgacgggcggcaacatcgtgacgcttgaagtctgcgggccgatgggcgaaaaagtgaatgctttttatggccttaccggcgacgggaaaacggcggtgattgagatggcggcagcaagtggcctgatgctggtcgcgcctgaaaagcgtaatccgttgctggcctccagttttggtacgggggagttaattcgtcatgcgctggataacgacattcgccatattattctcggcattggcggcagtgcgacggtcgacggcggtatgggcatggcgcaggcgctcggtgtgcgtttccttgatgccgacggtcaggcgctggcggcaaacggtggtaatttagcgcgcgtggcaagcattgagatggatgaatgcgatccgcgtctggcgaattgccatattgaagtagcatgtgacgttgataacccgctggtaggggcacgcggcgcggcggcggtgtttggcccgcaaaaaggggcaacgccggagatggtcgaagaacttgaacaggggctgcaaaattacgcccgtgttttacaacagcaaactgaaattaatgtctgccagatggcgggcggcggcgctgcgggcggtatgggtattgcggcggcggtatttctcaatgcggatattaaaccgggcattgaaattgtgttgaatgcggtcaatcttgcgcaggcagtgcagggcgcagcactggtgattaccggggaagggcgcatcgacagccaaacggcaggcggtaaagcgccgctgggtgtggcgagcgtggcgaagcagtttaatgtaccggtgattgggattgctggcgtattgggtgatggcgtggaagtggtgcaccagtacggcattgacgcggtattcagcattttgcctcgtctggcacctttagccgaagtgctcgccagcggtgaaaccaatctcttcaacagcgcgcgaaatattgcctgcgccattaaaataggtcagggaattaaaaactaacccttacctttaaagcggatgcgatttatatcgcataagagtgcagtactcatgccggatgcggcatgagtaccatatccttcctgaaaatcgcgcaaattctatatattgcagagatcatgtaggcctgataagcgaagcgcatcaggcaatgttacaaaaaaagccacggtataaaccgtggcaaaatccaacatagctaaaaataatcaggcgagtggtatgacttaaatctctacgtcgcggttacaatctttgctgtaaatatagctgaacgcttcaccacgccctacaccataaccagcctgtaaagaataagcgcccataaagatgtaatcgccttttttcaccgggatccagttattgtcgaggttataaaccccctgaccggaaagaatataggcaccgtgttcctgaacgtgtgtttcgatataaccgtggctggcacctggtgcaaaagagaggatatgcatgttcatatcaaaacctaactctttgggcagaaaatccagcagaataacatcgtccatgccttcataatgaatgcgttccagttcgctggcattgccagaaaccagccacggtgcatagccttctaccggaacatagcggcgcttatataaaaagatttggctgtcttcggcctgggcgttaacaaacgtcattaaggagcctggcgggcaataaagatagccaccttcgcttaaggcaaatgttttgccttcggctttggcagtgatatttccagagatcacatacaggaacgtttcaatgccttcgccaccgaagccctgttggttgccaccgttttgatgcagtgtgaccagataatcaacaaaagaggcacccagctttggcgtggagaggattgtcgcgtcacaattttcaaagcccggaataatattttttaccagaccatccggggttaacagtgcgaaattaccgtgtttaacaatcgcacggttagccagtaaatcttcgcggtaaccggtgacgttatttaaatatcccatttatgactccttatttctgccaggcaagttgataaagcatgagtgccaacgttttgaccccttcggcaaggtcggtaatattggtgcgttccgccgggttatggctgatcccgttgatgctggggataaaaatcatgcaggttggtacgcgaggcgcgaaaatttgcgcgtcgtgcccggcaccactgtgcatcacccggtaattcagtttttctctttcacacaattctgtcagggtggcgaccagctccttattcatcggcacgggttcttcgtccatccataaatcgatatcaataccaatgtccatttcatcgcaaatcgcccgcatgtcgttttctaactgttgggtgaaatcgcgcagcacggcagcgtcggtatgacgacaatcaatggtgaacgtggttttacccggcaccacatttaccgtattcgggcgcggctctactttgccaaaggtcagaaccagcggatcgcccatccttttcgctttttcgacgctctgatggcaaatgcgactgaaagcgtaaactgtatcacgacgataacccatcggcgtggtgcctgcatggttactttcgccgttcagcgttaccgtataacgacgctgcccgacaattgcattcaccacgccaatactttgcccattactttccagcacacagccctgttcaatatgcagttcaacaaaggctttaatatcctgacgcggagttagtggggcgttcggaagagtaaatccgcaagccttcatcgcatcgacaaaactatttcctttggcatcacagatattccgcacgtcgtcaggattcgccagcccaaaaatatttttactgccccagaagacatacgggaagcggctgccttcttcttctgccatcgccaccacttcgaccgtacgtagcggcgcgccgtattgcgttttcagccagtcaattgccagccacgccgccagcgcgccgaattgcccgtcaaggttaccgccgttaaccacggtatcgatatggctaccgctcagaaccacttcctgtggatattcggtgccattcaggcgaccgtataaattccccacttcatcgaaacgtgtttccagcccgcttgctgccattctttttttaaattgctgctgggtttccagccattccgggctataaagtaaacgggtcatcccacccgctgggtcagcgccaaaagaggaaagccagggcagcgtttcttctatagcttgacggaaatgtgtaatcataagaaagtcctgtctcaataattattgcgcaaagggatttttcgtttcgtaactcgtgttataaagcgcgtcggaaattaaatactggtaaatatcatcaacaatttcgatgccttcgacggcggctttgcgttgtttaatatcctgatcctgtccgggataataaacctgattaaaaccgggcgcgggggtaatggcatttaattcgcgcatggtctggctaagatgttgacggaataattcgctggaggagaaaaagttcggattaataactatatgtaattgccccaaattacgccctgcgtgtaaatcgtcatacatgctactaacctgtcgcccgaacggtaagccgagtaagacgccactgaggacgtcaatcatcatcatcaggccatacccttttggcccggcggcggggagcagagcatgtaccgcgaacggatcggttgttggtacaccgtttttatcgaccgcccaggtatccgggatagacatattacggctgcgggcgtcgagcacttttccccatgcctgtacggtagtcgccatatcaaaggtaaggatctcgtcgccttctcccggcgcggcaaaggccagggggttagtaccgtagtaaatttccgcgccgccaaacggcaccaccattggatcggactggcacatgctaatgccaatgaatccggcgcgggctgcctgctgcacaaaataagagattgcgccgctgtgacccatccggctgataccgaccaccgcaacgccattttgctgggcggttttgatggcatgttccatacccattttcgccgcgacctgtccggcggcattgtcggcatgtaaaattgcgctgcacggcccggtttcctcaagacgaaactccggttcgcggttggtgccgcctttactaatgcgttccgcgtagtattccacgcgcaccgcgccatgagagtggatccctctggcatcggcgtaaaccaatacttcagccacggttgcagcgtgctcacgttttaacccagcctggcagagtttattctcaattagctggtggagtgtttcccgactgattttcatctgtcttcctttttaacgacggtgtgaagcatgactgcaattaacatacagggaaaatatctggattatgtgatccagacaggcaaaaaaatatagttagaatttatttgataatccgctcacttttaacctgatttttaaaacaacaacgcttattaaaaaataatgagtaatagcctggtggttatttgaattcttttgttaataattcctgtgtgatattcatcaccttatttactcgttgtcatcgataccgtaatcgccacattaacactgctcgtgcaattgccatgggtgcaatttttaaggagttgttatgatccacgcctttattaaaaaagggtgttttcaggatagcgtcagtttaatgattattagtcgaaaactcagcgaaagtgaaaatgttgatgatgtttccgtaatgatgggtacgcccgccaataaagcgttattagataccacaggtttctggcatgacgattttaataacgccacgccgaacgatatttgcgtggcaattcgtagcgaagcggcggatgcggggatcgcgcaggcgattatgcagcagcttgaagaggcgctaaaacaactggcgcaggggagtggcagcagccaggcgttgacgcaggtgcgtcgctgggacagtgcctgtcagaaattacccgatgccaatctggcgctgattagtgtggctggcgagtatgcggcggagctggcaaaccaggcgctggatcgcaacctcaacgtgatgatgttctccgataacgtcacgctggaagatgaaatccaacttaaaacccgcgcgcgggaaaaaggcttgctggtgatggggccggactgcggtacgagcatgattgccggcacaccgctggcttttgctaacgtgatgccggaaggcaatattggcgtcattggcgcttccggtaccgggattcaggagctgtgtagccagattgcgctggcaggggagggaattactcacgcgattggccttggcgggcgcgacctcagccgtgaagtgggcggcatcagtgcgctaacagcgctggaaatgctcagtgcagacgagaaaagcgaagtgctggcatttgttagtaaaccacctgccgaagctgtgcgtctgaaaattgttaatgccatgaaagcaaccggcaaaccgacggtggcgctgtttttaggttataccccggcggtggcccgcgacgagaatgtctggtttgcctccagcctggatgaggccgcacgcctggcttgcctgcttagtcgcgtcacggcgcgacgtaacgcaatagcgcctgtcagcagcggatttatttgcggtttgtataccggcggtacgctggctgccgaagcggcgggattacttgccggacaccttggcgtggaagccgacgatacccatcaacatggcatgatgctggacgccgatagccaccagattattgacctcggcgatgatttctacaccgtcgggcgtccccatccgatgatcgacccaaccttacgcaaccagttaattgccgatctcggcgctaaaccgcaagtgcgcgtgttgctgcttgatgtcgtgattggcttcggtgcgaccgccgatcctgccgccagcctggtgagcgcctggcaaaaagcctgtgccgcgcgtttagataatcaaccactgtatgccattgccacggtgacaggcactgaacgtgacccgcaatgccgcagccagcaaatcgccacgctggaagatgcggggattgcggtcgtgagtagcctaccggaagccaccttgctggcggcagcgttaattcatccgctcagccctgccgcacagcaacacacaccgagtttactggaaaacgtcgccgtgattaacatcggattacgcagctttgcgctggagctacaaagcgccagcaaaccggttgtgcattaccaatggagcccagtcgccggtggcaataaaaaactggctcgtttattagaacgtttgcaataaggggttcccatgtttacatcagtggcgcaagccaatgctgcggttatcgaacaaattcgtcgcgctcgtccacactggctggatgtgcaaccggcttcttcacttatcagcgaactaaacgagggcaaaacactgcttcacgccgggccgccaatgcgctggcaggagatgaccggacccatgaaaggggcgtgcgtgggcgcatgtctgttcgaaggttgggcgaaagatgaagcgcaggcgctggcaatactggagcagggggaagtgaacttcattccttgtcaccatgtgaatgccgtcgggccaatgggcggtattacttctgccagtatgccgatgctggtggttgagaacgtgaccgacggcaaccgggcgtactgcaacctcaacgaaggtatcggcaaagtgatgcgttttggcgcttacggcgaagatgtcctgactcgccatcgctggatgcgcgatgtgttaatgccagtattaagcgcggcgctggggcgcatggagcgcggtatcgatctcacggcgatgatggcgcagggcattacgatgggcgatgagttccatcaacgcaatattgcttcctctgcactgttaatgcgtgcgctggccccacaaattgctcgcctcgatcatgataaacagcacatcgccgaagtgatggatttcctcagcgtgaccgatcagttcttcctcaacctcgcgatggcttactgcaaggcggcgatggatgctggcgcgatgatccgcgcaggcagcatcgtcacggcaatgacccgcaacggcaatatgttcgggattcgggtaagcgggctgggcgaacgctggtttactgcgcctgtaaacactccgcaaggtctgtttttcaccggcttctcgcaggagcaggcgaacccggatatgggcgatagcgcgattaccgaaacctttggtatcggaggtgcggcaatgatcgcagcgcctggcgtaacgcgctttgtcggtgcgggtggcatggaagcggcaagagcggtatctgaagagatggcggaaatttaccttgaacgcaatatgcagttgcagatcccaagctgggattttcagggcgcgtgcctggggctggacattcgtcgcgtggtagaaaccggcattacgccactcatcaataccggtatcgcccataaagaggcggggatcgggcagattggcgcaggcaccgtgcgggcaccgctggcgtgctttgaacaggcgctggaagcactggctgaaagcatgggtattggttgaggaacgcgcaatgacgatcatccatcctctgcttgccagtagtagcgcaccgaattatcgccagtcctggcggttagcgggagtgtggcggcgggcgattaacctgatgacggaaagcggcgaactgttaacgttgcatcgtcagggtagtggtttcggccccggaggatgggtgcttcgccgtgcgcaattcgatgcgttatgcggtggattatgcggcaatgaacgaccacaggttgtggctcaagggattcgcctcgggcgtttcacggttaaacagccacagcgttattgtttgctgcgtattacgccgcctgcgcatcctcaaccacttgcagctgcatggatgcaacgcgcggaggaaaccgggcttttcgggccactggcgttggcggcaagcgatccgctgcctgctgagttacgccagtttcgtcactgttttcaggccgcgctcaatggcgttaagaccgactggcggcactggctgggtaaaggccccggattaacgccgagtcatgatgacacgctgagcggaatgctgctggcggcctggtattatggcgctttagatgcgcgctccggtcgtccgttttttgcctgttccgacaatctgcaactcgttaccacagcggtgagcgtcagttatttacgttatgccgcgcaaggatatttcgccagcccactcctgcactttgttcatgctctgagttgcccgaaacgtaccgctgttgcgattgatagcctgctggcgctggggcatacgagtggggcagatacgctgctggggttctggcttggccaacaattattacaaggaaaaccatgaaaacactggttgtggctcttgggggcaacgccttactccagcgcggtgaggcgctgacggcagaaaatcaatatcgcaatatcgccagtgctgtacccgcgctggcacgcctggcccgttcttatcggttggcgattgttcacggcaacgggccgcaggtggggctgctggcattgcagaatctggcgtggaaagaggtagaaccgtatccgctggatgtgctggttgcggaaagccaggggatgattggctatatgctggcgcagagtttgagcgcacagccgcagatgccgcccgtgacgacggtgctgacgcgcattgaggttagccctgatgatccggcgtttttgcagccagagaaatttattggtccggtttatcagccagaagaacaagaggcactggaagcggcttacggctggcagatgaaacgtgatggtaaatatttgcgccgggtggtggcgtctccgcaaccgcgtaaaattctcgacagcgaagccatcgagttgttgctcaaagaggggcatgtggtgatttgcagtggcggcggcggtgtgcctgtgacggatgacggagcagggagtgaagcagtgattgataaagatctcgccgctgcgttgctcgccgagcagattaatgcagatggactggtgatcctcaccgatgctgatgcggtatatgaaaactggggaacgccgcagcaacgtgccattcgccatgccacaccggatgagttagcgccatttgccaaagccgatggtagcatggggccgaatgtaacggcggtgagtggttatgtcagaagccgtggtaaacccgcgtggattggggcgttaagccgaattgaagagacgctggcgggcgaagcggggacctgtattagcctgtaatcgtaggcattagacatttgtgcctgatgcgacgcttgacgcgtcttatcaggcctacaaccggtgccgcatccggcaattggtgcacaatgcctgatgcgatgcttgacgcatcttatcaggcctacaatgggtaccggatcggtaggccggataaggcgtttacgccgcatccggcaagaatagagcaccagttaaccgaacttactctgcgcccaaatcacgccgctggcatattccggcggcagcagcgggattaaggcttccagcgtcgcagtcagacggcttgtgtcgctgtcggtcaaattcagatgccccactttacgccccggacggacttctttgtcgtaccagtgcagatgcaccagcggcagtttcagccagtcataattcacatcgctaccaatcagattgatcatcacgctcggattattcaccactggttgcggtaacggcagatcggtaatcgcccgcagatgcagctcaaactggctgatgctggcaccgttttgtgtccagtgaccgctgttatgcacacgcggtgccagttcgttgatcaacagaccttgcggggtgacaaaacactccatcgccatcacgcccacatagcccagctcctgcataatcgcgctcagcatctcttcggcttgcgcctgctgctgtgcgttggcctgcggaaaagcgacgctggtgcgcaaaataccgtcctgatgcaggttatgcgtcagcggataaaacacggtgctgccatcaaagccgcgcgcgccaaccaggctcacttcaccagagaagttaatgccctgctcgacaatacattcgccgtaacactctgccggtaactgttcggtttcatttgcgcgtaaacgccattgaccgcgaccgtcataaccaccagtgcgacgcttaacaatcgccagctcacctaaacgatcaaacaccgcaggccactcgctgcgttcggcaagtaactgccacggtgcagtcggcaggtggagcttatcgaaaagctgcttctgagtcagacggtcagcaataatcgggaacacatcgcggttcacaaaggccggatggcgcgccagctcgcgggttaatgcggtttccggccagcgttctatctcagcggtaatcacgctttgttgaaaaggcaccgccgccggttcagcgtccagcccgactggccagacagcaatgcctaacggttcgcctgcctgacgcagcatacggcctaactgcccgttaccgaggacgcaaacctgtttcatgccgcacctcgcgggtccgggttttccagcacttcgtcggtctgggctttgcgccagtcattcagacgctggtgcagttctttatcatgagtcgcaagaatttgtgctgccagtaacgccgcgtttgccgcgccagctttaccaatcgccagcgtacccaccggaatgccgcgcggcatttgtacgatggagtagaggctatcgacaccgctcagtgcggcgctctgtactggcacgcccagcaccggcaccagcgttttggcggcaatcatgcctggcagatgcgctgcgccgcctgcgcccgcaataatcacctgataaccgttctcttcggcgctttcggcgaagctgaacagtttatcgggggtgcggtgagcagaaaccacttcaacgtggtgcgggacattcaggatttcgaagatttcggcggcgaactgcatggtagcccagtcgcttttggaccccatcacgatggcgacacgcgccggattattgcgggaagacatgcgtcttaaaactcctgtggtgcacaactctcggctttagagggcacagagaatagcacggaaagagagcaaggaaaacggttgcgtggctgtgaaatcagcaaagttgcgggttttttaaaacggaaaatgaatcagctcaacgtcatccgccgtgactttcaccatactaccttccgtatgccaggcacccagtaccacgcgaaaagcaggttgctgattggcgataagttcatgcaccgccgggcgatgggtatgcccgtggatcagccattgcacctgatgtttttccatcgcactgaccaccgcgttttggttaacgtccatgatcgccaggcttttactgctgttggcttctttgctgttcgcgcgcattcgcgcggcaatgcgtttgcgcacaaacaacggcagggcgaggaatagcgtctgcagccagggtttgtggaccttggcgcgaaaagcctgataacccgcgtcatcggtgcacagcgtgtcgccatgcataatcaacacccggcgaccataaagttcgagcaccttttcttccggcaataacgtcatgccactttcacgggcaaagcgtttgccgagcagaaaatcacggttgccatgaatgaaataacagggaacgccggaatcggacaccgctttgatcgccgccgccatcttgcgatggagtgggttgggatcgtcgtcgccaatccatgcttcaaacagatcgccaagaatatacagcgcgtcggccttgcgggcttcccccgctaaaaaacgcagaaaaccggcggtgatcgccggttcttccacgcagagatgaagatctgcaataaagagtgtcgccacgattactcgctaacggtcacgctttcaatgataacgtcttcttttggcacgtcctggtgcataccgctacgaccggttgcaacacctttgattttgtctaccacgtccatgccgtcaaccacttcagcaaacacgcagtagccccaaccttgcaggctttcgccagagaagttcaggaagtcgttatcaaccacgttgatgaagaactgtgcagttgcagagtgcggagcctgagtacgtgccattgccagcgtaccacgggtatttttcaggccgttgttggcttcgtttttgatcggttctttggtggctttttgtttcatgcccggttcaaaaccgccgccctgaatcataaagccgttgataacacggtggaaaatggtgttgttgtaaaaaccttcgcggcagtagtccaggaagtttttaactgtttcaggtgctttatcgtcaaaagttttgatgacaatatcgccgtgattggtgtggaaagtaaccatttttgcatcctgttccgtttgattggtgcttcaacccagttcgggtcatatatagggtggtgttatagcataaccgcacgatcggatcatcacgcaatgtatgctgattcgcgcgggaaatatgggtattatacgcaactcaattacccacacatgtctaaacggaatcttcgatgctaaaaatcttcaatactctgacacgccaaaaagaggaatttaagcctattcacgccggggaagtcggcatgtacgtgtgtggaatcaccgtttacgatctctgtcatatcggtcacgggcgtacctttgttgcttttgacgtggttgcgcgctatctgcgtttcctcggctataaactgaagtatgtgcgcaacattaccgatatcgacgacaaaatcatcaaacgcgccaatgaaaatggcgaaagctttgtggcgatggtggatcgcatgatcgccgaaatgcacaaagattttgatgctttgaacattctgcgcccggatatggagccgcgcgcgacgcaccatatcgcagaaattattgaactcactgaacaactgatcgccaaaggtcacgcttatgtggcggacaacggcgacgtgatgttcgacgtcccgaccgatccaacttatggcgtgctgagccgtcaggatctcgaccagctgcaggcaggcgcgcgcgttgacgtggtcgacgacaaacgcaacccaatggacttcgttctgtggaagatgagcaaagagggcgaaccgagctggccgtctccgtggggcgcgggtcgtcctggctggcacattgaatgtagcgcaatgaactgcaagcagctgggtaaccactttgatatccacggcggcggtagtgacctgatgttcccgcaccacgaaaacgaaatcgcgcagtccacctgtgcccatgatggtcagtatgtgaactactggatgcacagcgggatggtgatggttgaccgcgagaagatgtccaaaagcctgggtaacttctttaccgtgcgcgatgtgctgaaatactacgacgcggaaaccgtgcgttacttcctgatgagcggccactatcgcagccagttgaactacagcgaagagaacctgaagcaggcgcgtgcggcgctggagcgtctctacactgcgctgcgcggcacagataaaaccgttgcgcctgccggtggcgaagcgtttgaagcgcgctttattgaagcgatggacgacgatttcaacaccccggaagcctattccgtactgtttgatatggcgcgtgaagtaaaccgtctgaaagcagaagatatggcagcggcgaatgcaatggcatctcacctgcgtaaactttccgctgtattgggcctgctggagcaagaaccggaagcgttcctgcaaagcggcgcgcaggcagacgacagcgaagtggctgagattgaagcgttaattcaacagcgtctggatgcccgtaaagcgaaagactgggcggcggcggatgcggcgcgtgatcgtcttaacgagatggggatcgtgctggaagatggcccgcaagggaccacctggcgtcgtaagtaattgcgctattgccggatgcgagttttcgcatccggttatcgtctgcgccaccacaacattcccatcagtagcatccccggcaaccacacccacatcaattcagaaataatcacctgatgcccgtacggcgtggtgtaacgagacaatgcaaacggcgcgacttttatcacctgccagggagcgaaaaagcgttcatcactccacggccacagccagccaacgcctttaccgccagtggttacgctatccagcaagctgtggcttagcaagctgacggttaaaaacagccagcagcgaatcagcccagccctgaaccatcggcgtccaataaacacacataacagcgggacaacaaacgcaaacaccaggctatgggtaaacccgcgatgaccaaaaacattgccgtaagcaacgccaaatttaaagctcaatacgtcggcgtcgggcagcatcgccaggatgattccggcaaataacagacgcggagggatgactttgctacccaaccctaaaccaatgcataggggaacggcggcgtgcgtaataacggttggcatgatggtcgcttcggcaaaatgtcgatgctatcagcatggatgaacggggcgtagagggcaaaagtctgaaaagagaaccggcctgttgatacaggccgggaaagggatcaggcaacaacctgtacgctgtgacctgcaaaactcactgtctgaccggcgacgattttgcagcgtttgcgcgtttcaaccgcaccgtcgactttcacctggccttcggcaatcgcgattttcgcctgcgcgccgctttcgctccagccttccagtttcagcaagtcgcacagctcaacgtgcggatgtttacctaaagaaaatgtcgccatgttactcatcctgtggatcatgatattcaacgcacgcctgtagcgtgttttcaatcagcgtggcaaccgtcatcgggccaacgccgccgggaacaggcgtaatgtaactggcgcgtttagccgcgtcttcaaacacgacgtcgcccacaactttgccattttccagacggttgatgccgacatcaatcacaattgcgccttctttgatccagtcaccgggaataaagcctggcttgccaacggcaacgatcaatagatcggcattttctacgtgatgacgcagatttttagtgaagcggtgagtcactgtagtggtgcaacctgccagcagcagttccatgctcatcgggcggccaacgatattgcttgcgccaatcaccacggcgttgaggccgaaggtatcaatgttgtaacgctcaagcagcgtgacgataccgcgcggggtgcagggacgcagacgcggcgcgcgctggcacagacgaccgacgttgtaaggatggaaaccgtccacgtctttgtccggatgaatacgttccagcactttgacgttatcaatacccgccggtaacggcagttgaaccagaatgccatcgatggtgttgtcggcattcagcgtatcgataagctccagcagctccgcttcgctggtggtttccgggaggtcataagagcgggagacgaacccgacttcttcacaagccttgcgtttgcttgcgacataaatttggcttgcagggttactacccaccagcacaacggccagtcctggtgcccgcagtccggctgcaatacgcgcctgaactttttgagcaacttcagagcgcacctgctgcgcaatcgttttaccgtcaataatctttgctgccatcagagagaggattccatctgttacgtagatcgaaggggatgcgcctattttgtcagaagcggggcgcgctgtcaggtttcgtttcagatttatcgcgtgaagcgacctcttgcgaaggtgaggcgcaccgtcgctgagactgaaagcttcatttttcgtccatgatggcgttgtaaatctggaactgatttatttccttgtctaaggattaagataatttaagaaatacctgacaatataaaaagaattttcagcctggtaatttaccgcttcaggtctatatttgtgttgaatatattttgcgcggaagtattcatctaacggggctctctattttttagaatagagtgcatattttcaattaagacattcttagaggataaaaaggaatttactactatcagtgtcttaaataaagtaatcggttatatacggatgtggagtcgataaatgagattgaaggaatatatatgaaattaagatttattagctctgcgctggctgccgcactattcgccgctacgggtagttatgctgccgttgtagatggcggtacaattcactttgaaggcgaactggtgaatgctgcctgtagtgtgaatactgacagcgcagaccaggttgtcacactcggtcaatatcgtaccgatattttcaatgctgttggtaatacctctgcattaattccattcaccattcagttgaacgactgcgatcctgttgttgccgctaatgctgccgttgcattttctggtcaggctgatgcaatcaatgataatttattggccattgcatccagtaccaatacaacaacagcaacgggtgtcggtattgaaatacttgataatacatccgcaattctcaaacctgatgggaatagcttcagtaccaaccagaacttgatccccgggaccaacgttcttcatttttctgcacgttataaaggcaccggtacaagtgcaagtgcagggcaagcaaatgctgacgcgacttttattatgagatatgaataatcaaaaccacgttgttttgaattatatatcacgtcttataacaaagtaatgtaccggttgtctgaagcggtatggtggcaatgtaaatcgaaatcatgttcactttgtatcatgccgctttattaaatgaaaagggaatgatgtgttgtaagaaaccaaagcaatcatttctttatattccttatttttgccgtcaggaatacacaaggcgtattaactatgatgactaaaataaagttattgatgctcattatattttatttaatcattagcgccagcgcccatgctgccggagggatcgcattaggtgccacgcgtattatttatcccgctgatgctaaacagactgcggtatggattagaaatagccataccaatgagcgctttctggtcaatagctggattgaaaacagcagcggtgtaaaagaaaagagtttcatcattacaccgccactgtttgttagtgaacccaaaagcgaaaatactttgcgtattatttacaccggtccaccgctggcagcagatcgtgagtctctgttctggatgaatgttaagacgatccctagcgtagataaaaatgcattgaacggcaggaatgttttgcaactggcgattttaagccgcatgaaattatttctccgtccaattcaattacaagaattacccgcagaagcgccggacacactcaagtttagccgatccggtaactatatcaatgttcataatccaagtcctttttatgtcaccctggttaacttacaagtgggcagccaaaagttggggaatgctatggctgcacccagagttaatagtcaaattcccttacccagtggagtgcagggaaagctgaaatttcagaccgttaatgattatggtagtgtaactccggtcagagaagtgaacttaaactaaccgaatcatctgacaatatcagagctaattatgaaaatacccactactacggatattccgcagaggtatacctggtgtctggccggaatttgttatagttctcttgccattttaccctcctttttaagctatgcggaaagttatttcaacccggcatttttattagagaatggcacatccgttgctgatttaagccgctttgagagaggtaatcatcaacctgcgggcgtgtatcgggtggatctctggcgtaatgatgagttcattggtagccaggatatcgtatttgaaagcacaacagaaaatacaggtgataaaagtggtgggttaatgccctgttttaaccaggtacttcttgaacgaattggccttaatagcagtgcatttcccgagttagcccagcagcaaaacaataaatgcatcaatttactgaaagctgtacctgatgccacaattaactttgattttgcagcgatgcgcctgaacatcactattcctcagatagcgttgttgagtagcgctcacggttacattccgcctgaagagtgggatgaaggtattcctgctttactcctgaattataatttcaccggtaacagaggtaatggtaacgatagctatttttttagtgagctcagcgggattaatattggcccgtggcgtttacgcaacaatggttcctggaactattttcgcggaaatggatatcatagtgaacagtggaataatattggcacctgggtacagcgcgccattattccgctgaaaagtgaactggtaatgggagacggcaatacaggaagtgatattttcgatggcgttggatttcgtggtgtacggctttattcttctgataatatgtatcctgatagccagcaagggtttgccccaacggtacgtgggattgcccgtacggcggcccagctaacgattcggcaaaatggttttattatctatcaaagctatgtttcccccggcgcttttgaaattacagatttgcacccgacatctagtaatggcgatctggacgtcaccatcgacgagcgcgatggcaatcagcagaattacacaattccgtatagtacagtgccaattttacaacgcgaagggcgtttcaaatttgacctgacggcgggcgattttcgtagcggtaatagtcagcaaagtagccctttcttttttcagggtacggcactcggcggtttaccacaggaatttactgcctacggcgggacgcaattatctgccaattacaccgcctttttattagggctggggcgcaatctcgggaactggggcgcagtgagcctggatgtaacgcatgcgcgcagtcagttagccgacgccagtcgtcatgagggggattctattcgcttcctctatgcgaaaagcatgaacaccttcggcaccaattttcagttaatgggttaccgctatagcacacaaggtttttatacccttgatgatgttgcgtatcgtcgaatggaggggtacgaatatgattacgacggtgagcatcgcgatgaaccgataatcgtgaattaccacaatttacgctttagccgtaaagaccgtttgcagttaaatgttagtcaaagtcttaatgactttggcagcctttatatttctggtacccatcaaaaatactggaatactagcgatagtgatacgtggtatcaggtggggtataccagcagctgggttggcatcagttatagcctcagttttagctggaatgaatctgtagggatccccgataacgaacgtattgtcggacttaatgttagtgtgcctttcaatgttttgaccaaacgtcgctacacccgggaaaatgcgctcgaccgcgcttatgcctcctttaacgccaaccgtaacagcaacgggcaaaatagctggctggcaggtgtaggtgggaccttactggaaggccacaacctgagttatcacgtaagccagggtgataccagcaataatgggtacacgggcagcgccacggcaaactggcaggccgcttacggtacgctggggggcgggtataactacgaccgcgatcaacatgacgttaactggcagctgtctggcggtgtggtcgggcatgaaaatggcataacgctgagccagcctttaggggataccaatgttttgattaaagcgcctggcgcaggcggtgtacgcattgaaaatcaaactggcattttaaccgactggcgcggctatgcggtgatgctgtatgccacggtttatcggtataaccgtatcgcgcttgataccaatacgatggggaattccatcgatgttgaaaaaaatattagcagcgttgtgccgacgcaaggcgcgttggttcgtgccaattttgatacccgcataggcgtgcgggcgctcattaccgttacccagggcggaaaaccggtgccgtttggaagtctggtacgggaaaacagtaccggaataaccagtatggtgggtgatgacgggcaagtttatttaagtggtgcgccattgtctggtgaattactggttcagtggggagacggcgcgaacagtcgctgcattgcgcactatgtattgccgaagcaaagcttacagcaagccgtcactgttattagcgcagtttgcacacatcctggcagttaaaggaaattatcaataagataatctgcagattattattggcgatggcatgtttgtgtctggcaaacatatcctgggctactgtttgtgcaaatagtactggcgtagcagaagatgaacactatgatctcagtaatatctttaatagcaccaataaccagccagggcagattgttgttttaccggaaaaatccggctgggtaggtgtcagtgcaatttgtccacccggtacgctggtgaattatacataccgtagttatgtcaccaactttattgttcaggaaactatcgataattataaatatatgcaattacatgattatctattaggtgcgatgagtctggttgatagtgtgatggatattcagttccccccgcaaaattatattcggatgggaacagatcctaacgttagccaaaaccttccattcggggtgatggattctcgtttaatatttcgtttaaaggttattcgtccctttattaacatggtggagatccccagacaggtgatgtttaccgtgtatgtgacaagtacgccttacgatccgttggttacacctgtttataccattagttttggtggccgggttgaagtaccgcaaaactgcgaattaaatgccgggcagattgttgaatttgattttggtgatatcggcgcaagcttatttagtgcggcagggccgggtaatcgacctgctggtgtcatgccgcaaaccaagagcattgcggtcaaatgtacgaatgttgctgcgcaggcttatttaacaatgcgtctggaagccagtgccgtttctggtcaggcgatggtgagcgacaatcaggatttaggttttattgtcgccgatcagaacgatacgccgatcacgcctaacgatctcaatagcgttattcctttccgtctggatgcagctgcggcagccaatgtcacacttcgcgcctggcctatcagtattaccggtcaaaaaccgaccgaagggccgtttagcgcgctggggtatttacgcgtcgattatcaatgaggtacggagaatgagaagagtactctttagctgtttctgcgggctactgtggagttccagtggatgggcagttgaccctttaggaacgattaatatcaatttgcacggtaacgttgttgatttctcctgtaccgtaaacacagcggatattgataagacggtagatttaggcagatggcctacgatacaactactgaacgctggcgataccacggcactcgtcccttttagcctgcggctggagggatgtcctccgggtagtgttgcgattttatttacgggaacgccggcatccgataccaacctgctggctctggatgatcccgcaatggcacaaaccgtcgccatcgaattacgtaatagcgatcgctcccggctcgcactgggggaggcgagcccgactgaggaagtagatgcaaatggcaatgtcacactaaacttttttgccaattatcgagcgttagccagcggtgttcggccaggtgtggcgaaagcggatgcgatatttatgatcaattataattaatattatattaattcgtataatttggcgtagtcgataagctctacaatactatgcaaacctagcttgccataaatattagatttatgcgcactaactgttttattgctaagtaataacttatcggcaatttctttattagataatccgctaaccagataacgtaatatggtcacttcacgattagatagcacagtgaccgtactactattcgtactacatttattgctttttatatagttaagcgtttcgctgggaaaaaacgtgtatccggagaggatcatctgaacggcatgaaaaatatcattctgatcattgcatttactgacaaaaccgttagcaccagcttgtatcgctctgccagcataaaagcattcacttttgctacttaaaaataacactttcactgtgctctggatttgtttgatccttttcaggaaggtaaaaccgtctgttccgggcaagtctatatccataatgattaaatcaacaggacgggttcggagataatcgatggttatgcgataatcatccgttttcaggacaatctgcaattcactgtttttttgcaacagaacttcaatagacattctgatgataggatgagtatccataatgatcacgctcgttggtttcatagttaccagtctcataggagcggacaattttccgttaggtcgggaaattgtactttgatacatgaaaatacgggttttcttgattcagacgcgcagcggtgtgcgtttgtttgccgctatagcgaaataaatcagaaaatcagacgcggtcgttcacttgttcagcaaccagatcaaaagccattgactcagcaagggttgaccgtataattcacgcgattacaccgcattgcggtatcaacgcgcccttagctcagttggatagagcaacgaccttctaagtcgtgggccgcaggttcgaatcctgcagggcgcgccattacaattcaatcagttacgccttctttatatcctccataatttcagagtgggacatatttgggacattatcaccaaaaatgtcgtctattttcctcgcatgctctgtcaaatgattaggcgcaaggtgagcatacctacgaaccatttctatggactcccatccgcccatttcctgaagcactgataatgggacgcctgactgaatcagccagcttgcccaggtgtgtctgaggtcatggaaacggaaatcttcctcatttatgcccgtcttatccgtttccgctttgcccttcaccacatcactttttgtcgctgtttggcgagataattcaacggtgtcaggccgtaaaacgccttaaaaacagagataaagtagctcgtgctgctatagccacataattgcgccacctgagtgatatttttgttatccatcaataacatctgtacggcgtaacgcatacgacactctgtgacaatctggctatagctggtattttcgttttttaatttctttttgagcaggctggggcttaaacataggctactggcgacaattcgcagattccagtaatgctgaatatcgctttgaataatgcggcagacgctgtcgcggacgctgctgcgtaagatatacatcagtagggcaataaaccggctttgctcaagaaagttagacaatacggtaaaaagcaatgcgcgcgtcaactccgcttcgcagggtctgctgggttgctgcttgctgtggttggcggctagccggaacacttccggtgtacggctatgacaagcgataaccggggttgccagccggctccagggctttacacaggttaagttcttatttaaaaacaacagataatcgttgatgatgttacggttgatgtgggtgattaatacgtgatttaacgtactgagttcaatgacgttattgttgcacgcgaaggcggccaggtagtttttcggaagggtaaacgtagcatggttattgacgcttacctctacctctttttcggtcaggatcaccacgcaaggttcactgctgctcaattgcatttcgcactcctcagatatcagaaactccgctcaaaggatctatgcttcctgcatgagtgatcggcccgttcgccgataacgatcttctttctttagcacgctttttagcaattaatcttgatggaattctgatgagagcgaaagaggtaagccaggtcgtacccgacttacctggaggagatttaatactcgagaatgccgtgcgcgacgggcaaatagcgcagagagaaatagagagtgtctttaccgcaagaggaacgtttcgctaacaggctggcaatttctgcgtccggtttcggtttcgctgtaaaggttttgcctttgccggcgacaaaaagttcataaacaacgccgctggcaggggcgggactttggcaatcggcgctggcctgtaaataacgttcacgctgttcagcggtcagtttatccacgccgctgccatcctgtacccagacattaacgccggttgctttaacgtgttccagcagttggcgatagccatcggggctcatgtttccggcgaaaaaactactgatataaaccggttttgcactaacatcgctaatcagccgctgcgcgttgtttaaccatgttagcaaaggctgacgggcggcttcgctgcgccagttcaggtcgtcaatttccgcgctgatgtaccagccatccggcgttatgccaggcgcggcgctccataatctggcttgctggagatcggcagccagcaggcgattaagatagctttccagcgctgcggagctctgtttctggtgcataaaaaattccggatcggcgttcagcccgacaataagcttcagaccagcctgttgcgcagctgcggcccgcttaaacaataacgtgcgctgttctggctgggtaaatgcatcgccgtaacgggtccattgcaaaacaagggtatcgaagccttgcaaacgtaactgactcatcagcccctgccactgggtatcggtaacctgactatctcggttttgtggttgccagataatacctttcatcgcaaaggaaaaagggctgaccaaaagcagtgtcagcaatacgaaaatgaacttacgcatttaccagtgcactccaatggtgagaaacgcgttgttgcgctctccgttacgttgattaatcgccttaaaggtatgttgatactcgacgccgagactgactttgtgcggccaggcgtcgtagtgcgtctcgccggtccagatattccagcggaccccgactccgccaagctgcgcgccctgagtgcctttatcacgatagccgttgtcctgaacgtgagcgtaaggctcaatagtctgtccgttagctaccttctgatgccagctgacgcgataatctgccgtccacgcctgaatatcctggcggatatattgcgccgcatcgaggtacaggttttgggcaaaccagccactaccgttcgggtgccattcgtcgctgtatttgccgccattaaagaaactggcgctggcgcgcagcatggtatcggatgcgccattttggccgttcagcggcaactgctgttcgacggcgatgaaaaagatctgatcgcgcagcggcttccagcgcagaccggtgccggacatcggatttttcaccggcatcatcaccccgttttctccggtatcggcaaagacgcggctataaacactgagcaggtcgccttccagcagcatattgcgtccgatgcggtactcggcttccagttgtccgtagctacgatagcttttccctggcgctgcgccgccgacattattgttagcggtactcattgcgccggaacgcaagccgatggaagaatcgaaactgaacgtccagcggcgaccgacctcctcatgcaaacggcggaaattgaagcgttgttgattttgttctggggtcagtggggttatcagcgcctgattatcaatgtcatcaatcaccagccgggcgtagtgctgcgtcgcaggcatgtcatccagacgctggttcacgtaggccagttgtcggatcagtgccggatcgtccggaagccctttatgcgccggttcgagcatttcccggctctgtgcgatatcaccgctatcccacaaggcgtaaccaagcgctgcctgggtgttgctattattcggttccagttccagcgcggcgcgcaaatcactcaccgcggccgggacattatgacgttggcgataaattgtcgcccgcgcaacgtaagcgttggcagaaggcgcaatattgatactgcgcgtgagatcgttcagtgcgagttccggctgaccaggaatgtaacgttgcgcatgcagccaccagtagagggcattgcttcccagtccacgtttttctgcctgttgtagccagcgatcgcgagccgcaccatttcctgccgcctgggcggtattggcagcagcaagcagatcctcattgctcatgtcgtgaagactgattttctgccaggccgccagtgcggtggcgtagtcctcaacctgatacgcctgataggctaccgcacgatgttgccaggcgctcggttgtcgttgttcggcctgaagccatgcatacaacgccacaccgggtagcgtgtcccgataacactttgccagacggttccaggcggcggcatcgtaggaagggctcatatcgcccagcaagcgaactattgccgggcaattatctgcaatacccggcaactgactttgccactgacgttgctccgccagcggtaagggtttgcttaaaatcgccaccttcgccggcgttgccaggtaaggatgactttccagcagagacgccagtcgcgccattaaagtctggctgacacgcgcatcgccctggaaaggatagcgttgcagcaataaatcggcagcttcgcgactctgctcgttctgcatcagttgccaggttagttgatccaggcgggtaagatttgccggttcttgctgatacagcaatcgtgccagacgcagagcttcagccttgttacgggtcgccacgctgacagcataacgctcctcaagcatttcattggcggggagggtggcgagcagtttttgcgctgcgtcgtactgaccttcttttaacagcaccggtagcgtcgcgccaacaacatactggcggttgtcggcaaactgtaccgtataattcgccaacgcctgaacggggttagcgctgtatttagataacagatagagccaacttttctcttgtgcgtccgtggtaaatagtggcttattttcaatgagataatgctggaggcgtgctttttcgccacgataagccagcgcggtcgcgtaagtaatataactctgaggatcggtgaagatcccctgactttgcagtgccaggatccgatcgtccagctgcccggcaagaagcacgtcaaaccactgacggcgttctgccgcgcttaatgtgttctgctggcgtgcttcattgtatagcgtatctgcctgggaccattgtttcaggtagattgcccgttgcagcagatcggttcgcagcgtttttccttccgggcttgcagcaaacgtcgcatcgttcagttgcgctctggcgacaggtaactgtgccagccgcagggcattctgcccgacttcactgcgacaacgcagggtcggcgcagcatcgcacgctttttgctgggcaagcagttcttcaactgtcgtaacgcttttcacttcaaccggaatagccgccagactgcgctcaagtcgggcatctcctgggtgacgtttcagttgatcctcaagcaacagccgcgcccggtcatcatgaccaaaatggcgataggcttccgcaaggtataaagtcagcggaatattatccggcacctgctggtgtatatattcaaattcgcggatggcggttgcttcgtcgttatttttctgtgccttcagcgctttatcgagacggggataaataacaaaatggcgataatcgctcagccccagctcttctgcgctggtgccgatattgtctgcgagtgcgctggtactcaataaagacgtcagcagtaaaccagaccatccgatgacgcgattaaggttattctccttcattttcggactccagttgcgcaacctgttctgtgtttaaacctgctttgagtaatagactttgcatgctaacttgtaattcgcgttgaattgtcaggacgcgatccaacgtttcctggctgataacgccttcggtgaccaaaaacttgccgagcggcagagaactgcgttcatggcgcaataacaacacgttaattgcactacgattaatatgaccgagcgtggtcagtatttcggcgaacaggaactgatgcggcacatattgccgccagatttcaccggcctgctgttccgtgagccactgatgctgaaccgcattgtacaacattgcccgcggatcgtgaccgcgtcggcgtgcataccagtgacgtaaccctgtgacaatttgtccccgcagaacaatgacgtaacgcactttgcgtccgactttacgcgtcagggccgccaggctaaccgggtcaataccatcttcactgccgacaattaactcgtcattttccagacgcagcggcagtaccgcataatgcagcgccacggaggccggcatttcggcaatcaggctggaagggatctgccaggcatcgatggattcccacgccacgccgttttgctctgccagcgcctgtgccagctgctcggcgctaatcagcccctgcatcagcatactaccgcccaggcgtagaccttcgacgcgattacgcagtgctgtatcgagttgttcttcagtgatgacctgattttccagcagaatttgacctaacgggcgcaagctgcgggtatcgccagtcacgctggggaagtcatgcgttgttttatcccacgccacgcgacgtggatcgccgtgttgaagtacctgttttagcgcgcgccagttggccatgaagttaatcaggttgccccagaaaagacgcaggacggaaagcagcccctgcgtcaggccgtagtagccagtaacgaaaatcacccgctgcacgatgcggttaaccatcaaaccaaagtttagccacagcagggtcattaaccatgcgctgccgctgaaaatagaaaggaaatgccaggcatcgggccacaaactttcatacgccagcaacagcaaaagctggatcatcaccagcatcgcgaggaagctgacaaagttactgattgcccctttgcggtcgcgccagagaaagtagttcagcgtcaggctggaggtccatttatgggttttaaagccttggaaaacaatgccgatgatccagcgggatttttgtcgaaccgcagtgctaaaggtatcggggaaatattcgcgcacgcagatcatgttacttgtccgcgcgtgctgtaaaaatttacgctgctcgcgttctttggcttcgtccaccaccggaaaacggacaaaaatttccgtcatacctttttctttcaggcggaagccaatgtcgtaatcttcagtaagactctgcacgtcgaaagcaataccgtcaccgtcagctaacagtgcggtcacggcgcggcggctgaaacaggtgccgacgcctgcgctgggcacttgtccggcgagggcttcacgcaccggaacatctttgccatgcagctcactaaactcatcaatgtaagtcatgctggtgaagtgcgtccattcgcgttcgaacggatacaccgggatctgaatcagatctttacgctcgaccagatagttgaacagacgcaattccatcggactaatcacatcttcggcgtcatgcagaataaaaccagcaaaagcgaaattggcgctacgctcaaattgggtgatggcgtccagcacgttgttcagacagtcggctttgctggtggggccaggacgcgcgcagactaccttatgcacattcgggaagcgagcgcacacttcgtcaacatcacgctgagtatcggggtcgttggggtaggtgccaacaaagatatgatagttttcgtagtcgagcgtggtcgccgccagctcggccatattgccgatgacgcccgtttcattccacgccggaaccataatcgctaacggtttttcatctggtttatacagttcgcggtaactcattcgcgggtagcggcgataaacactcaacttgcgtttaatgcggcgtacccagtagacgacatcaataaaaaaatcgtccagcccgctgatgaacatgatgaccgctaacgttatcgcgattacttttaagccgtagagccaggtagcaaaaacatcaagaagccagtccacacaaaaaccttacattaacgctggttatgtttagggtggcgtatattaaggttttttatgaattgtgacagctttttaccattaataggtatgactattgcggcacgttatttttacactggttataaaagttgccgtttgctgaaggattaagcgggtaatgtgataacaaaccttgtcccccgcgcatcgctcgttaccgcaaccgtgcctttatgcgcgacaacaatgcttttcactatcgccaggccaataccgctaccttcaccttttcgctggcgggaggggtcaacgcgatagaaacggtcaaacaatcgcggtaagtgctcgggcgcaatgggcgtaccggggttttcgacgataacttgcaccaggtgatcgaccgtctgacagcgcactacaattgtctctccggttggcgtataacgcagggcgttgctaagcaggttgcttagcgcccgacgcagcatcagcggatcgcccgcgacctgacacttgtcgccaacaaaccgcaactccacgccgcgatcttccgctaacgcctcgaaaaaatcgaacactttgccgacttcatccgccaggttgagcattttcttttcggggattagctggttgttatcggcctgagcgagaaacagcatatcgctgaccattttcgccattcgcgtcagctcttcgagattagagtagagcacatcttccagctccttctggctgcggctctggctgagggcgatttcggtttgcgttatgagattcgtaattggtgtgcgaatttcgtgagcgatatccgcactgaaattggactggcgggtaaagacatcctcaatacgctcgatcatatggttgaagctcagtaccagctgttccagctcaatgggcacggtctgcgggtcgaggcgaacgtcgagatctttgctggtaatattctggatttgacggctgacgctgcggatcggcgcgtgacctttatgtaccgccaacagtacgataaagacgatcaggatgctgattacgcttgcggtcataataagtttattcatcaaatcatttatgtaatgaagatgaaaatcgatgctaagcgcgatgtagagcgtataaatcggtttgccgtccaccaacgggccaaccggcaagttaatcatccgccagttgctgtgttccatatgcccgtgaccgtggcctggcatcatcatcgtcgggccggaaaggagatacacctcgccaccctgagcgtctttatcgggtatggcgtcacgcgtaaactcgcggatatccggcgcaccgggggagtgatacaccgttttaccctgactatctgccagggaaatcaacacattggaataaccactgacgatatcttccagcgtcattaagcgtcgggcttgcgtttcgtcagggtgatttagtacccgttcaagggtggcgctaatctcttttaaatcattaatatcctgctcggcaaaatgaacttttacactgtggatcatgatccatgcaaaggcgaaaaacgccgcgatggtggccaggctgataaaaaaggtcaggcgggttgccaggctaaacgggcgctgaaatggcttactgaccatccggcacctcaagcatgtaacccacgccgcgcacggtctgaattagcttcggctcaaagtcgttgtcgattttgccgcgcagccgcttcaccgccacatcaatagcattggtatcgctgtcaaaattcatgtcccatacctggctggcgataaggctgcggggcagcacttcgccctgatggcgaaggaagaactccagcagagtaaactctttactggtcaaagtgatgcgcgtgccgctgcgggtgactttgcggctgacgagatcgaccatcaaatcggcaacctgaaactgactttcgataatcaccgccgccccgcgccgcagtaatgtgcgcacccgcgccagcagttcagcaaaagcgaatggcttcaccaggtagtcatctgcccccaactccagccccttgacgcgatgttcaatggtgccaagcgcggtaagcaacagaatcggcatccctttattggcggagcgtaacatgcgcacgatatcccagccgttcacgtccggcagcataatatcgaggattatcagatcataatcaccggtcatcgccagatggtagccattcagcccgttgtcggccaaatcgaccacaaaaccggcttcggttaaccctttggtcaagtattctccggttttcttttcatcttcgacaatcaacagtttcatatttcctccgcatgttgcccgggcaattctagagtagcgggatcagatggcaatcgcttattggcaaaatgacaattttgtcatttttctgtcaccggaaaatcagagcctggcgagtaaagttggcggcataaaatcaccagaaattatgagcctatgtctccttgtaaacttctgccattttgtgtggcccttgcgctaaccggttgtagtctggcaccggattatcagcgtccggcaatgcccgtgccgcagcagttcagtctcagccagaacggcctggttaacgcagcagataactatcagaacgcgggctggcgcaccttttttgttgataatcaggtgaagacgctgattagcgaggcgctggtgaataatcgggatttgcgcatggcgacgctgaaagtgcaggaggcacgggcgcaatatcgtctgaccgatgccgaccgctacccacagctcaatggcgagggcagcggcagctggagcggtaatcttaaagggaataccgccacgacacgggagtttagcaccggccttaacgccagctttgacctcgattttttcggtcgcttaaagaacatgagcgaagccgagcgacaaaattatttagccactgaggaagctcagcgcgcggtgcatattctgctggtttctaatgtcgcgcaaagctatttcaatcagcaactggcgtatgcgcaattgcaaatagccgaagaaacgctgcgtaattatcagcagagttatgcgtttgtcgaaaaacaactgttgacaggtagcagtaatgttctggcgctggaacaggctcgcggggtgatagaaagtacccgcagcgacatcgctaaacgtcagggggaactggcgcaggcgaataatgcattgcaactgttgctgggaagctacggcaagctgccgcaagcgcagacagtaaacagcgacagcctgcaaagcgttaaattaccggcgggattgagcagccaaatcttattgcagcgcccggatattatggaagctgaacacgcgttaatggcggctaatgccaatattggcgctgcacgcgcggcattttttccgtctataagcctgaccagcggaataagcaccgccagtagcgatctaagcagtttatttaacgccagcagcgggatgtggaattttatacccaaaattgagatccccatttttaatgccggacgcaaccaggccaatctggatatcgccgaaattcgccagcagcagagcgtggtgaattatgaacagaaaatccagaacgcctttaaagaagtggcagatgcgctggcattacgtcaaagcctgaacgatcaaattagcgcccagcagcgttatctggcaagcctgcaaattactttgcaacgggcgcgggcattatatcagcacggcgcagtaagttatctggaagtgctggatgccgagcgttctttatttgcaacccgacaaactttacttgatctgaattatgcccgtcaggttaacgaaatttctttgtataccgcacttggtggcggttgacagcaatatactcgtcatacttcaagttgcatgtgctgcgtctgcgttcgctcaccccagtcacttacttatgtaagctcctggggattcactcgcttgtcgccttcctgcaactcgaattatttagagtatgacttttaactccaggagagaataaatgaaaaaagcactgcaagtcgcaatgttcagtctgtttaccgttattggctttaatgcccaggctaacgaacatcatcatgaaaccatgagcgaagcacaaccacaggttattagcgccactggcgtggtaaagggtatcgatctggaaagcaaaaaaatcaccatccatcacgatccgattgctgccgtgaactggccggagatgaccatgcgctttaccatcaccccgcagacgaaaatgagtgaaattaaaaccggcgacaaagtggcgtttaattttgtccagcagggcaacctttctttattacaggatattaaagtcagccagtaacccaggtttaatgagatgaaaaaaatcgcgcttattatcggcagcatgatcgcgggcggtattatttctgcggcaggttttacctgggttgcaaaggcggaaccgcctgcagaaaaaacgagcaccgcagaacgtaaaatcttattctggtacgacccaatgtatcccaatacgcggttcgataaaccaggtaaaagcccgtttatggatatggatctggtgccgaaatatgccgatgaagagagttctgcgtctggtgtgcgcattgacccgactcagacgcagaatctgggggtgaaaacggctaccgtcacgcgcggaccgctgacttttgcccagagtttcccggcgaatgtcagttacaacgagtatcagtatgccattgtgcaggctcgcgctgccgggtttatcgacaaggtgtatccgcttaccgtgggcgataaagtacaaaagggcacaccgcttctcgacctgaccattcctgactgggtggaagcgcagagtgagtatttactgctgcgcgaaaccggcggtacggcgacccagactgaaggcattcttgagcggctgcgactggcgggaatgccggaggcggatattcgccgcctgatcgccacgcaaaaaatccagactcgctttacgctcaaagcgcccattgatggcgtgatcaccgcgtttgatctgcgcgcgggaatgaatatcgccaaagataacgtggtagcgaaaattcagggtatggacccggtgtgggtcactgctgcgatcccggagtctatcgcctggctggtgaaagatgccagccagtttaccctcaccgttccggcgcgaccggataaaacactcaccatccgcaaatggacgctgctacctggcgtggatgccgcgacccgcacgctgcagctgcgtctggaagtcgacaacgccgacgaggcgctaaaaccgggcatgaacgcctggttgcaactcaacaccgccagcgaaccgatgctgctcattccgagtcaagcgctgattgataccggcagcgaacagcgggtgattaccgttgatgccgacgggcgctttgtaccgaaacgcgttgctgttttccaggcaagccaaggcgtcaccgcattacgctctggtctggcggaaggtgaaaaggtggtttccagcggcctgttcctgattgattccgaagccaatatttctggcgcactggagcggatgcgctctgaaagtgcgacccatgcgcattgagggaataaccaatgattgaatggattattcgtcgcagcgtggcgaaccgttttttggtgctgatgggcgcgttgtttctgagcatctggggcacctggaccatcattaatacgccagtggatgcgctgccggatctctccgatgtgcaggttattattaaaaccagctatcccggtcaggcaccacaaatcgttgaaaatcaggtgacttatccgctaaccaccaccatgttgagcgtgcctggcgcgaagactgtgcgcggtttcagtcagtttggcgactcttatgtgtatgtcattttcgaagatggcaccgatccgtactgggcgcgtagccgggtgctggagtacctcaaccaggtacagggtaagctgcctgcgggagtcagcgccgagctggggccagatgccacgggtgttggctggatctatgaatatgcactggtggatcgcagcggtaagcacgatctggccgatttacgcagtttacaggactggtttctcaaatatgagctgaaaaccatccctgacgttgcggaagtggcgagcgtgggcggtgtggtgaaagagtatcaggtggttatcgatccccagcgcctggcgcagtatggcatcagtctcgccgaagtaaaaagcgcgctggatgctagtaaccaggaagcgggcggtagcagcatcgaactggcggaagcggaatatatggtgcgcgccagcggctatctgcaaacgctcgacgactttaatcacatcgctttaaaagccagtgaaaatggcgtgcccgtttatctgcgcgatgttgcgaaggtccagattggcccggagatgcgccggggcattgccgaactaaacggcgaaggcgaagtggcgggcggggtggtgatcctgcgatccggcaaaaacgcccgagaagtgatcgccgccgtgaaggacaaactggaaacgctgaaaagtagtctgccggaaggcgtggagatagttacaacatacgatcgcagccagctcattgaccgcgccatcgacaacctcagcggcaagttgctggaagagtttattgtggtggcggtagtctgtgcgctgtttctctggcatgtgcgcagcgcgctggtggcgattattagcttgccgctggggttgtgtattgcttttattgtcatgcacttccagggactgaatgccaatattatgagcttgggtggcattgcgattgccgtcggggcgatggtcgatgctgctatcgtcatgatcgagaatgcgcataaacggctggaagagtggcagcaccagcatcctgacgccacgctggataataaaacgcgctggcaggtgatcaccgatgcgtctgttgaagtggggccggcgctatttatcagtctgctgattatcacgttgagctttatcccgatcttcaccctggaagggcaggaagggcgtctgtttggcccgttggcgttcaccaaaacgtatgcgatggcgggtgcggcgctgctggcgatcgtagtgatcccgatcctgatgggctactggatccgtggcaaaattccgccggaaagcagtaacccgctcaatcgctttttgattcgtgtttatcatccgctgttgctgaaagtactgcactggccgaaaaccacgctgctggtggcggcgcttagcgtgctgacggttctctggccgctcaataaagttggcggggaatttttaccgcagatcaatgaaggcgacttgttgtatatgccaagcacgctgccggggatttccgcagcagaggcggcgagtatgctgcaaaaaaccgacaagctaattatgagcgtacctgaagtggcgcgggtatttggcaaaaccgggaaagcggaaaccgccaccgattctgctccgctggagatggtagaaacgaccatccagcttaagccgcaggagcagtggcggccaggcatgacgatggacaaaatcattgaggaactggataacaccgtgcggctgccggggctggcgaatctgtgggtgccgccaattcgtaaccgtatcgatatgctcagtaccggcattaaaagccccatcggcattaaagtttccggcactgtgctggcggatatcgacgcgatggctgagcaaattgaagaagtagcgcgaacggtgccaggcgtagcttctgcgcttgccgagcggctggaaggtgggcgctatatcaacgttgagattaaccgtgaaaaagccgcacgttacggtatgacggtggcggatgtgcagttgtttgtgacttctgcggtgggcggggcgatggttggcgaaacggtggaagggattgcccgttatccaattaatctgcgttatccgcaaagctggcgcgatagtccgcaggcactgcgccagctgccgatcctgacgccgatgaagcagcaaatcaccctggcagacgtggccgacattaaagtctctaccggaccgagcatgctgaaaaccgagaatgcgcgcccgacgagctggatttatatcgatgcccgcgatcgtgacatggtgagcgtggttcacgatttgcaaaaagcgatagctgaaaaagtgcagttaaaaccgggcaccagcgtggcattctccgggcagttcgagctactggagcgcgccaaccataagcttaaactcatggtgccgatgacgttgatgattatcttcgtgctgttgtatctggcgttccgtcgggtgggcgaagcgttgctgattatcagcagcgtaccgtttgcgctggtgggcggcatctggttgctgtggtggatgggctttcatctttccgtggcgacgggcactggctttatcgccctcgccggggtcgccgccgaatttggcgtggtgatgctgatgtatttacgtcacgccatagaggccgtgccgagcttgaataatccacaaacattcagcgagcagaagctggatgaggcgttatatcacggcgcggtcctgcgcgtgcgcccgaaagcgatgacggtggcggtgattatcgccggtctgctgccgattctgtggggaacgggggctggtagtgaggtgatgagccggattgccgcgccgatgattggcggcatgatcaccgcacctttgctgagcctgtttattatcccggcggcgtataagctgatgtggctgcaccgacatcgggtacggaaataaaagcaggataccccgtttaaccgtgtggattgtgtcttgcgacgatgggcactaaatgttaaaaggtgcccctcaacaaaaaagacacacaggggaaaggcgtgaaaaacgcgagtaccgtaagcgaagatactgcgagcaatcaagagccgacgcttcatcgcggattacataaccgtcatattcaactgattgcgttgggtggcgcaattggtactggtctgtttcttggcattggcccggcgattcagatggcgggtccggctgtattgctgggctacggcgtcgccgggatcatcgctttcctgattatgcgccagcttggcgaaatggtggttgaggagccggtatccggtagttttgcccactttgcctataaatactggggaccgtttgcgggcttcctctctggctggaactactgggtaatgttcgtgctggtgggaatggcagagctgaccgctgcgggcatctatatgcagtactggttcccggatgttccaacgtggatttgggctgccgccttctttattatcatcaacgccgttaacctggtgaacgtgcgcttatatggcgaaaccgagttctggtttgcgttgattaaagtgctggcaatcatcggtatgatcggctttggcctgtggctgctgttttctggtcacggcggcgagaaagccagtatcgacaacctctggcgctacggtggtttcttcgccaccggctggaatgggctgattttgagcctggcggtaattatgttctccttcggcggtctggagctgattgggattactgccgctgaagcgcgcgatccggaaaaaagcattccaaaagcggtaaatcaggtggtgtatcgcatcctgctgttttacatcggtagtctggtggttttactggcgctctatccgtgggtggaagtgaaatccaacagtagcccgtttgtgatgattttccataatctcgacagcaacgtggtagcttctgcgctgaacttcgtcattctggtagcaagcctgagtgtgtataacagcggggtttactctaacagccgcatgctgtttggcctttctgtgcagggtaatgcgccgaagtttttgactcgcgtcagccgtcgcggtgtgccgattaacagcctgatgctttccggagcgatcactagcctggtggtgttaatcaactatctgctgccgcaaaaagcgtttggtctgctgatggcgctggtggtagcaacgctgctgttgaactggattatgatctgtctggcgcatctgcgttttcgtgcagcgatgcgacgtcaggggcgtgaaacacagtttaaggcgctgctctatccgttcggcaactatctctgcattgccttcctcggcatgattttgctgctgatgtgcacgatggatgatatgcgcttgagtgcgatcctgctgccggtgtggattgtattcctgtttatggcatttaaaacgctgcgtcggaaataaggcattcacgctacatccgacaaaacgatgtcaaccatccgaaaccgctctcatccattcgatgagagcggtttttttaattactgcttaaatgcacccgccagagagcgaatatcattgccggttggcgagtaatccccgcatatccggttgtcaggtcaggatggtaaggcacctgctttacactttcgcccgtggtcagtgatggctgcgggcgaatcgtaccagatgttgtcaattaatcgtgttggcacagcgttatgactatcttttcttttatctgccagtgcacagcaaacatctcattctcacgatgaatgatgacctgctgtttattccagctaattatctgatagtccagaaaacctgcatcagtttggatctcacttgccttaaatgcgctctctttggcggaaaatgccagtgtcagcgccagagaaaaggctaaaccgcagtctgcgagtcgctcgtgttccgctggtgtaataatgttgtctgtcaattctcttgcggtttgtacagaaaaaatttcttctatatcaatgccaatcggttgacgagataccacggctaatgccgtagtcccacagtggctaatactgccgtatacctccgcaggccagacaggttggcgtagctcgccgattgcgggcacacatttatagccatattcccgcaaagcataaacagcagcgatccgtccggctaaatgctctgttttacgtttacgtccagcgtgttgcagttgtgcgtagtgcggcagccagagtaaatcctgttcacaaaaattcgccggatcgaactcaacaaaatgcagcgtatgtccggcaaaggggagggaggtatgcgtagttttcatatcgaccatattcgagactgatgacaaacgcaaaactgcctgatgcgctacgcttatcaggcctacatggtcctgcaatatattgaattggcaagatttttgtaggccggataaggcgttcacgccgcatccggcatgaacgacgcgcactttgtcaacaatctgacgttagcatcagaagtgggtgtttacgctcatataccacgtacgtcccggctcgttataggtatacgccccggcaccggcgatatagttggcccctgccgaatcgcccgtggtctgggcattacccgcacgccacaaacgtttgtcgaacagattgtccacgccgccggtcagactgacattcttcgtcacatcccaggtcgcgctcaggccaacaatgctgtaaggactaatttctttggtttccggtccaaccgctggctgacctttatagttgtacttcttcggctgctgcttgccgtaccaggtgaaggtcgtttgcatgctcaaatcttcccgtgcctgccagctcagcgtactgttcaacgtatactccgggatgatgctcaaacggtcgcccgtggttttgttttcactcttcagcatataagtgatgttattggtccacatcaccgtttcgctaaccggtacgtttaagcttccttccagaccttcaaccaccgctttcggcacgttatcccactgatagagatcggtgccgactgcgttttgccctacagccacatagcccgcttcaatcttattgcgataatcgttacggaaccaggtgacgcccgccagccacccgtcgcgtttgaactccagaccaatctctttgttgatgctggtttctgctttcaggtcatcgttaccttgcagatagcagccgcccgcgctggcatagcaaccctgacctttactgtagagaatgtagttcgggttagtctggtacaggctcggcgctttataagcacgggcgatgcccattttcagcgtgaagtcatcgcctaaaccttggcttatgttcagcgccgggctccagttattgccgacaatactgtgatgatcgaaacgcagccccggcgttacgatggtgctgtcagtcagctccatgttgttttcggcaaacaggctgaaaatttctgctttactatacgggctacggtcggtggtactcacgccatcaatagcgccaccggtattcgttccggtcagtgcctgggtgttggaacttaagtccttcatccgttgctgattccactccgtacccagcgtcagcgtctggttaacgaggaaatcaatcggcaggttaacttcgctgtgcagcatcacgtcatcaagatcgatatcgacgaaatcctgtgtcgctttttcgttaaatttcccttcggtaccgcccgccagaccttccggaatacggctgttacgggtgtgttcgtactgcacccagttgctggtggtcacgccgttatcccagccaccgttccaggtcagcgcgtagttctggcgatacagacggttggtttcatcgccatatttgctgcgggtataggaatcggagttggtattctgggtgtcgcccgcatacaggttaccctggcggctgtaacctgcttccagttccaggctttgcaatggcgcgaaatcccagcgcaccacgccattaatatctttgttgattaccccttcgcgcccggctggtaacgtcgtggcatacgttccggcacgcgcggactgatggccctggttgatatcccacgcgtcagcctgggttttgtcgaggttgccatacaaacggaagctgaattcgtcgcccagcggaccggtcaggctaaagttagtgcgtttggtggcaccttcctctttatgttctggcgcattgaaatatgcgtcccaggagccgtgccactcgccgctgccttttttggtaatgatgttaaccacgccgcccgccgcgccgttgccataacgcgcagctgccggaccacgcagaacttcaatacgttcaatcatttcaggtggcacccaggaagtatcaccacgggtatcgcgctcgccacgccagccctgacgcacgctgttacggctgcttaccggcttgccgtcaatcaaaatcagcgtgttttccggacccataccgcgaatatcaatctgtcggttattcccacgctgaccactggtggagttaccggtcaggttaacgcctggcatggtacggatgatcttgctcacatcgcgggcaaccgggtttttgcggatttcatctgcggtgatggtgctaacgccaggcgcctgtaagttctgctcggcggcggtaacgacaatagtatcgtcatgactaacaggagtatcggtcggctcttgtgcctgcgctaccccataaatccccagattgaccaacaaggccagggaatgaatcttcttgttcattgttttattcctgcatttttgccacgaattgcaactgtcgggcatggtcgtcatcaacacgacgcatcccgctaccgcgaaaacctttgatcctgaaagacacgcagtgcagttggttaattaatgtccgcgcttcccacggcgcgccattacgctattgcaaatgcaaatagttatcaataatattatcaatatatttctgcaatcaatgaaaaattgcacagtaaacatggggttatggtgtgacggcgttaaaagtaggaagtgagagctggtggcagtcgaaacatggcccggaatggcagcgtctgaatgacgaaatgtttgaggtcactttctggtggcgtgatccccaaggttctgaagaatacagcacgataaagcgcgtatgggtctacatcactggtgtgaccgatcaccatcagaacagccagccccagagcatgcagcgaattgcaggcactaacgtctggcagtggacgacacaactcaatgccaactggcgcggcagctactgctttattcccaccgaacgcgatgacattttttctgtaccatcccccgatcgcctcgaattgcgcgaaggctggcgaaaactattaccccaggcgatagccgatccgctgaacctacaaagctggaaaggcgggcgagggcacgctgtttctgcactcgaaatgccgcaagcgcctctgcaaccgggatgggattgtccgcaagcgccagaaatacctgccaaagaaattatctggaaaagtgaacggttgaaaaagagtcggcgtgtatggatttttaccaccggcgatgcaacagcagaagaacgcccgctggcagttttgctcgatggcgaattttgggcgcaaagtatgcccgtctggccagtgctgactagcctgacccatcgtcagcaacttcctcccgccgtgtatgtgttgatcgacgctatcgacaccacgcaccgcgcccacgaactgccgtgtaatgcggatttctggctcgcagtacagcaagagttattacccctggtgaaagctattgccccttttagcgatcgtgccgatcgcaccgtggttgccgggcagagttttggtgggctttccgcgctgtatgccggactgcactggcctgaacgctttggctgtgtattaagccagagtggaagctactggtggccgcatcggggcgggcagcaagagggcgtgttacttgaaaagctaaaagctggtgaagttagcgccgaaggtctgcgcattgtgctggaagcgggtattcgcgagccgatgatcatgcgggccaatcaggcgctgtatgcgcaattacaccccataaaagaatccattttctggcgtcaggttgacggcggacatgatgcgctttgttggcgcggtggcttgatgcaggggctaatcgacctctggcaaccacttttccatgacaggagttgaatatggcattcagtaatcccttcgatgatccgcagggagcgttttacatattgcgcaatgcgcaggggtaattcagtctgtggccgcaacaatgcgtcttaccggcaggctgggacattgtgtgtcagccgcagagtcaggcgtcctgccagcagtggctggaagcccactggcgtactctgacaccgacgaattttacccagttgcagaaggcacaatgagccagcatttacctttggtcgccgcacagcccggcatctggatggcagaaaaactgagtgaattaccctccgcctggagcgtggcgcattacgttgagttaaccggagaggttgatagcccattactggcccgcgcggtggttgccggactagcgcaagcagatacgctgcggatgcgttttacggaagataacggcgaagtctggcagtgggtcgatgatgcgctgacgttcgaactgccagaaattatcgacctacgaaccaacattgatccgcacggtactgcgcaggcattaatgcaggcggatttgcaacaagatctgcgcgtcgatagcggtaaaccactggtctttcatcagctgatacaggtggcggataaccgctggtactggtatcagcgttatcaccatttgctggtcgatggctttagtttcccggccattacccgccagatcgccaatatttactgcacatggctgcgtggcgaaccaacgcctgctagcccatttacgcctttcgctgatgtagtggaagagtaccagcaataccgcgaaagcgaagcctggcagcgtgatgcggcattctgggcagaacagcgtcgtcaactgccgccgcccgcgagtctttctccggcacctttaccggggcgcagcgccagcgcagatattctgcgcctgaaactggaatttaccgacggggaattccgccagctggctacgcaacttagtggtgtgcagcgtaccgatttagcccttgcgctggcagccttgtggctggggcgattgtgcaatcgtatggactacgccgccggatttatctttatgcgtcgactgggcagcgcggcgctgacggctaccggacccgtgctcaacgttttgccgttgggtattcacattgcggcgcaagaaacgctgccggaactggcaacccgactggcagcacaactgaaaaaaatgcgtcgtcatcaacgttacgatgccgaacaaattgtccgtgacagcgggcgagcggcaggtgatgaaccgctgtttggtccggtactcaatatcaaggtatttgattaccaactggatattcctgatgttcaggcgcaaacccataccctggcaaccggtccggttaatgaccttgaactggccctgttcccggatgtacacggtgatttgagtattgagatcctcgccaataaacagcgttacgatgagccaacgttaatccagcatgctgaacgcctgaaaatgctgattgcccagttcgccgcggatccggcgctgttgtgcggcgatgtcgatattatgctgccaggtgagtatgcgcagctggcgcagctcaacgccactcaggttgagattccagaaaccacgcttagcgcgctggtggcagaacaagcggcaaaaacaccggatgctccggcgctggcagatgcgcgttacctgttcagctatcgggaaatgcgcgagcaggtggtggcgctggcgaatctgctgcgtgagcgcggcgttaaaccaggggacagcgtggcggtggcactaccgcgcagcgtctttttgaccctggcactccatgcgatagttgaagctggagcggcctggctaccgctggataccggctatccggacgatcgcctgaaaatgatgctggaagatgcgcgtccgagcctgttaattaccaccgacgatcaactgccgcgctttagcgatgttcccaatttaacaagcctttgctataacgccccgcttacaccgcagggcagtgcgccgctgcaacttagtcaaccgcatcacacggcttatatcatctttacctctggctccaccggcaggccgaaaggggtaatggtcgggcagacggctatcgtcaaccgcctgctttggatgcaaaatcattatccgcttacaggcgaagatgtcgttgcccaaaaaacgccgtgcagttttgatgtcagcgtgtgggagtttttctggccgtttatcgcaggggcaaaactggtgatggctgaaccggaagcgcaccgcgacccgctcgctatgcagcaattctttgccgaatatggcgtaacgaccacgcactttgtgccgagcatgctggcggcatttgttgccagcctgacgccgcaaaccgctcgccagagttgcgcgacgttgaaacaggttttctgtagtggtgaggccttaccggctgatttatgccgcgaatggcaacagttaactggcgcgccgttgcataatctatatggcccgacggaagcggcggtagatgtcagctggtatccggcttttggcgaggaactggcacaggtgcgcggcagcagtgtgccgattggttatccggtatggaatacgggtctgcgtattcttgatgcgatgatgcatccggtgccgccgggtgtggcgggtgatctctatctcactggcattcaactggcgcagggctatctcggacgccccgatctgaccgccagccgctttattgccgatccttttgccccaggtgaacggatgtaccgtaccggagacgttgcccgctggctggataacggcgcggtggagtacctcgggcgcagtgatgatcagctaaaaattcgcgggcagcgtatcgaactgggcgaaatcgatcgcgtgatgcaggcgctgccggatgtcgaacaagccgttacccacgcctgtgtgattaaccaggcggctgccaccggtggtgatgcgcgtcaattggtgggctatctggtgagccaaagcggcctgccgttggataccagcgcattgcaggcgcagcttcgtgaaacattgccaccacatatggtaccggtggttctgctgcaacttccacagttaccacttagcgccaacggcaagctggatcgcaaagccttaccgttgcctgaactgaaggcacaagcgccagggcgtgcgccgaaagcgggcagtgaaacgattatcgccgcggcattcagcagcttgctggggtgtgacgtgcaggatgccgatgctgatttcttcgcgcttggcggtcatagcctactggcaatgaaactggcagcgcagttaagtcggcaggttgcccgccaggtgacgccggggcaagtgatggtcgcgagtactgtcgccaaactggcaacgattattgatgctgaagaagacagcacccggcgtatgggattcgaaaccattctgccgttgcgtgaaggtaatggcccgacgctgttttgtttccatcctgcgtccggttttgcctggcagttcagcgtgctcagccgttatctcgatccacaatggagcattatcggcattcagagtccgcgccccaatggccccatgcagacggcggcaaacctggatgaagtctgcgaagcgcatctggcaacgttacttgaacaacaaccgcatggcccttattacctgctggggtattcccttggcggtacgctggcgcagggtattgcggcgcgactgcgtgcccgtggcgaacaggtggcatttcttggcttgctggatacctggccgccagaaacgcaaaactggcaggaaaaagaagctaatggtctggacccggaagtgctggcggagattaaccgcgaacgcgaggccttcctggcagcacagcagggaagtactagtacggagttgtttaccaccattgaaggcaactacgctgatgctgtgcgcctgctgacgactgctcatagcgtaccgtttgacggtaaagcgacgctgtttgttgctgaacgcacacttcaggaaggtatgagtcccgaacgcgcctggagcccgtggatagcggagctggatatctatcgtcaggattgtgcgcatgtggatattatctctccagggacgtttgaaaaaattgggccgattattcgcgcaacgctaaacaggtaaattaatattatttataaacccataattacagaaaataattatgggttttttatttgtttgatttataggtttgatgaatatttctcttaaatagagtgaatgttgcattcagtggaaggaatttacaaacttcagcttcggataattatcaccaactggtaaagtgagcgccgtggagatttccccctattggactcattttcaggttataccccatgagtagtctgaatattaaacagggaagtgacgctcattttcccgattatcctctggcgagccccagtaataatgaaattgatttacttaatctaatcagtgttttatggcgggccaaaaaaacggtcatggcggtcgtttttgcgtttgcctgcgcaggcttgctgatctctttcatcctgccgcaaaaatggaccagcgcggcggttgtcacgcctccagaacctgttcagtggcaagagttggagaaaagtttcactaagcttcgtgtgctggatctggatatcaaaattgatcgtacagaagcatttaacctgtttatcaagaagtttcagagcgttagcttgctggaagagtacctgcgtagtagtccttatgtgatggaccaattaaaagaggcgaaaatcgacgaactggatttgcatcgcgcaattgtcgcattgagcgaaaaaatgaaagcggttgatgacaatgccagtaagaaaaaagatgaaccgagtctgtatacctcctggacgctaagttttaccgcgccaaccagtgaagaggcgcagaccgttttgagcgggtatatcgattatatctctacgttggtggtgaaagagagcctagaaaacgtccgtaataaactggagatcaaaacccagtttgaaaaagaaaaactggctcaggatcgcattaaaacgaaaaatcaacttgatgcaaacattcagcgcctcaattatagtctcgacattgccaacgcggcaggaattaaaaagcccgtttacagtaatggtcaggccgttaaagatgaccccgatttttctatttctctcggtgcagacggtattgaacgcaaactggaaatagaaaaagcggtcactgacgttgcggaactgaacggtgaattacgtaatcggcagtatcttgtcgagcaattaacaaaagcacatgtcaacgatgtgaattttacgccgtttaaatatcagttaagcccgagtttgccagtgaaaaaagacggtccgggtaaggcgattattgtgatcctttccgcgttgatcggcgggatggtggcttgtggtggcgtgctgttgcgctatgcgatggcatccagaaaacaggatgccatgatggcagaccacttagtttaactatttgcggtactaggtgccgttcgtccgagcggcaccacaagcggcgttccggcaactggatcgtcaatgatcatgcagcgcagaccataaatgcgctcaatcagttcagcagtgacaatctccttcggcgctccctgagcaacaattttcccttcccgcaatgcaatcaaatggctggcgtaacgacaggcctgattaagatcgtgcagcaccgccgccagggtatagcctttttcgcggttcagttcgcttaacaactccagcaaatcaatctgatgactgatatccagccaggtcgtgggttcgtcgagcagcataattgccgtttcctgggccagcaccatcgcgatccacgctcgctggcgttgtccgccagaaagggtatccacgctttgatctgccagatgagttattcccgtggcctgcattgctttcgttaccgcttcttcatcctctttgcgccagcgggtaaacagcggttgatgcggataacgtccacgcgccaccagctcctgcacggtgatatcgcccggcgtggtagcattttgcgccaacagaccaatccggcgtgcaacctctttactggcgtaatgttgaatgtgctcgccatccagccagacatgcccatgagcaggcgtcatcaggcggcttaaggtacgcagtaacgtggatttaccgcagccatttggcccgataattgccgtgaagtgaccatcaggtatttctacagtcagattttccgcaacggtatatttgccatatcccagggttaactgttcgccgcgcaaacgggctacactttcggtcattttttgcgagactcctgaattaacaagacgataaggtaaataccgccgaggctgacggtaacgacgccaaccggaagttgatacggcataaacagttgttgggcgcagagatcggccgccagcagtaacagcgccccgcatagcgccgcctgggttagcccccagcgagcggtgccgctaatgcgtcgggcaatgtgcggtgcgactaaagcaataaaggaaatcggcccggcaagcgctgttgccgcagcggtaagcaccactgcaaccagcatcattaacagacggctacgttcgacgctgacgcccagcgcacacgcggtatcatcgcccatttccagcaagcgcatccggcgtaccagtaaggcggcggcaatgagcatcaatataatgatgggtgcggaagggctggtttttgcccacgtcaggccgttgaggcttccggcattccacaaacctgctgttagcgccgtttctaaagacgctttcagcaacagccaggtattaaaggccaccagcatggcgcgaacgccgataccgataataatcaaccgaaaggtgtcgatgccgttgcgccaggcgagcagccagaccagcaggctagtgacaatgccgcccaccattgcactcagcgcgatagccgtcaggtcctgaccaaacagcaccatcgccaccagcacgccgctccacgccccggtgttaaagcccattacgtcagggctgccgagcgggttacgcatcaggctctgaaaaatcgcgccactgacgcccagtgctgcgccaatcaacagcgccatcagcacgcgtggtaaacgccattcggtgaccaccatcgtcatactgcgcggcgcatcgcccatcagcgcggcgaatacctggctggtttccagcgtgacggcaccgctgcgtaatccccagatacctgcaaccacacaggcggaaaccagcagcaaacaggtgatgagtaatcggcgagagacgtaaatcatgcaccacctcgcgttttacgtcgcacgaggaagatcagcaccggtgcaccaataaacgcactgaccacagaaacgcgcagttcgccgggcacaatcacccgcccgatgatatcggcaaacagcagcagggcaggggtagcaagtagcgtgacgggcaggctccagcgatgatcggcacccaccagccaacgcgccatatgcggcatcatcaggccaataaaggcaatcgggccaactattgccgtcgcactaccacaaagcacggtaatcgccagcagaccaatcaactgtgtgcgcgccacgcgactgcccagcgccgtcgcggtgtcgctgccgaggctcaaactgttcagcgcgcgactcagtaatagcgcagttgctccggcgatcagcaccgggatcagcaccacttttaaggtatgtagattgcgaatatccaggctaccggcttgccagaaacgcaactgatcgtagacgtcaggattaagcagggcgatgccgctggtcagtccttccagcaccgccgccagcgccacgcccgccagggttaaacgcaccggacttaactgcccgccgccctgactgccggtaaaggcaacaatcaaactggccaccagcgccccggcgaaggccatcgccagttgttcctgcgcggaagagtaaccaaacagcgccgcacccagcacaatggcaaagctggctccggcgttcacgccaagcaagccggggtcggcaagtgggtttcgggtgagggtttgcattaacgccccggcaaggccaagcgcgccgcctgccagtaaaccggcaagggtacgcggcagccgcgcgtcgagcacgatggtgcagtcggcgctctggcaggtgccggagaaggcctccagcactacggaagcggggagactttttgccccaatgagcaggcttaatgccgtcgcgataatcagtaataacagcaatccgggcacggcaatggcgcgtgtcacggcaacagaaccagacatacgaacttccatgataatgaaattaattatcgttatcgatcttatttggatatgttagcatgtgcagcctaagaataggtatttaaaatatttgatggcaaggcattgtaatgaataaacaatcctggctgcttaacctcagcctgttgaaaacgcacccggcgtttcgcgcagtattcctcgctcgtttcatcagtattgtgtctctgggtttgctcggcgtcgcggtgccggtgcagatccagatgatgacacattccacctggcaggtggggcttagcgtgacgctgaccggcggcgcgatgtttgttggcctgatggtcggcggtgtgctggcggatcgctatgagcgcaaaaaagtgattttgctggcgcgcggcacctgtggcattggcttcattggactgtgccttaatgcactgctgccggagccgagtttgctggcaatctatttacttggtttatgggatggttttttcgcaagccttggcgttacggcgctattggcggcgacaccagcactggtagggcgtgaaaacttaatgcaggccggggcgatcaccatgttgaccgtgcgtctggggagcgtgattagccccatgattggcggtttattgctggcgaccggtggcgtagcctggaactacgggctggcggcggcgggcacgtttattaccttgctaccgttgttaagccttccggcgttgccaccgccaccgcagccgcgtgagcatccgttgaaaagtttactggcaggatttcgttttctgcttgccagcccgctggtgggcgggattgcgctgctgggtggtttattgacgatggcgagcgcggtgcgggtactgtatccggcgctggctgacaactggcagatgagtgcggcacagattggttttctctacgcggcgatcccgctcggcgcggctattggtgcgttaaccagcgggaagctggcacatagtgcgcgaccagggttattgatgctgctctccacgctgggaagcttcctcgccattggtctgtttggcctgatgccgatgtggattttaggcgtggtttgtctggcgctgttcggctggttgagtgcggtcagcagcttgctgcaatacacaatgctgcaaacgcaaaccccggaagcgatgttagggcggattaacggtttgtggacggcgcagaacgtgacgggcgatgccataggcgcggcgctgctgggtggtttgggcgcgatgatgacaccggttgcttccgcaagcgcgagcggttttggtttgttgattatcggcgtgttgttattgctggtgctggtggagttgcgacattttcgccagacgccgccgcaggtgacagcgtccgacagttaatgcttaaaacagcgccttaagcctatccagcacttgcatggcgctgtagtaatccagacggaacgtctcggttcccagcgcataaacctgcttgttttgtactgcaggcaggtgcgcgagcagcggattagcataaatagcatcggcatctttctgatcaccggcgaacaggaatagactctcgccatttaaccctgcagccagattttccccaccaagctgaatgatgtcatggcgtttaccctgactttggctggcatttaaccctgcgggtaacttcgccagcgtaaagccgagttgttccagcatctgcccttgtgcactttctggcgtccagagattggcactgtgtgcagcggcagtatagacaatggcagtgaccggctgcggcggtaatttgatttgctctttcgccgccgccagttgcttatcaaactgcgcaatccgctctgccgcttgtttctcatgcccggtaatttcgccaagttgcgttaacaggctctgccagcttttgtcgtcgtaattgatgattaatgtcggggcgatggtggaaagctgatcatacagtgccagcgcgctatccccgccggttgcgctaattaaaatcagatccggcatttgcgcggcaacggcttcggcgctcggttcgccgatatagagccgttgcagtttgcgttctttcgccaccttgctccactggcgtaaaaagccctggtcatccgcgacgcggttattcggcgtggtcgcgccgctggcgatcaccggagcatcaatcgccagcagactgccggtcagggtgacgctggtggaaacaatacgctgcggctggctttccagtgtatgtgtgccacggctgtcagtaatctgacgcggccagtcagcggcctgaactgcggctattccactaagcaaaagtcctgttaatagaagggcgttgcggtagagcggggcgagtctcacaaatcagcttcctgttattaataaggttaagggcgtaatgacaaattcgacaaagcgcacaatccgtcccctcgcccctttggggagagggttagggtgaggggaacagccagcactggtgcgaacattaaccctcaccccagccctcaccctggaagggagagggggcagaacggcgcaggacatcacattgcgcttatgcgaatccatcaataatgcttctcattttcattgtaaccacaaccagatgcaaccccgagttgcagattgcgttacctcaagagttgacatagtgcgcgtttgcttttaggttagcgaccgaaaatataaatgataatcattattaaagcctttatcattttgtggaggatgatatggatacgagtctggctgaggaagtacagcagaccatggcaacacttgcgcccaatcgctttttctttatgagcccgtaccgcagttttacgacgagtggatgtttcgcccgcttcgatgaaccggctgtgaacggggatagccccgacagtcccttccagcaaaaactcgccgcgctgtttgccgatgccaaagcgcagggcatcaaaaatccggtgatggtcggggcgattcccttcgatccacgtcagcctagcagcctgtatattcctgaatcctggcagagcttctcccgtcaggaaaaacaagcttccgcacgccgtttcacccgcagccagagcctgaatgtggtggaacgccaggcaattccggagcaaaccacgtttgaacagatggttgcccgcgccgccgcacttaccgccacgccgcaggtcgacaaagtggtgttgagtcggttgattgatatcaccactgacgccgccattgatagtggcgtattgctggaacggttgattgcgcaaaacccggttagttacaacttccatgttccgctggctgatggtggcgtcctgctgggggccagcccggaactgctgctacgtaaagacggcgagcgttttagctccattccgttagccggttccgcgcgtcgtcagccggatgaagtgctcgatcgcgaagcaggtaatcgtctgctggcgagtgaaaaagatcgccatgaacatgaactggtgactcaggcgatgaaagaggtactgcgcgaacgcagtagtgagttacacgttccttcttctccacagctgatcaccacgccgacgctgtggcatctcgcaactccctttgaaggtaaagcgaatagccaagaaaacgcactgactctggcctgtctgctgcatccgacccccgcgctgagcggtttcccgcatcaggccgcgacccaggttattgctgaactggaaccgttcgaccgcgaactgtttggcggcattgtgggttggtgtgacagcgaaggtaacggcgaatgggtggtgaccatccgctgcgcgaagctgcgggaaaatcaggtgcgtctgtttgccggagcggggattgtgcctgcgagcagtccgttgggtgagtggcgcgaaacaggcgtcaaactttctaccatgttgaacgtttttggattgcattaaggagcgaggatgagcattccattcacccgctggccggaagagtttgcccgtcgctatcgggaaaaaggctactggcaggatttgccgctgaccgacattctgacgcgacatgctgcgagtgacagcatcgcggttatcgacggcgagcgacagttgagttatcgggagctgaatcaggcggcggataacctcgcgtgtagtttacgccgtcagggcattaaacctggtgaaaccgcgctggtacaactgggtaacgtcgctgaattgtatattacctttttcgcgctgctgaaactgggcgttgcgccggtgctggcgttgttcagccatcagcgtagtgaactgaacgcctatgccagccagattgaacccgcattgctgattgccgatcgccaacatgcgctgtttagcggggatgatttcctcaatactttcgtcacagaacattcctccattcgcgtggtgcaactgctcaacgacagcggtgagcataacttgcaggatgcgattaaccatccggctgaggattttactgccacgccaagtcctgctgatgaagtggcctatttccagctttccggtggcaccaccggcacaccgaaactgatcccgcgcactcataacgactactactacagcgtgcgtcgtagcgtcgagatttgtcagttcacacaacagacacgctacctgtgcgcgatcccggcggctcataactacgccatgagtagcccaggaagcctgggcgtctttcttgccggaggaacggttgttctggcggccgatcccagcgccacgctctgtttcccattgattgaaaaacatcaggttaacgttaccgcgctggtgccacccgcagtcagcctgtggttgcaggcgctgatcgaaggcgaaagccgggcgcagcttgccagcctgaaactgttacaggtcggcggcgcacgtctttctgccacccttgcggcgcgtattcccgctgagattggctgtcagttgcagcaggtgtttggcatggcggaagggctggtgaactacacccgacttgatgatagcgcggagaaaattatccatacccagggttacccaatgtgtccggatgacgaagtatgggttgccgatgccgaaggaaatccactgccgcaaggggaagtcggacgcctgatgacgcgcgggccgtacaccttccgcggctattacaaaagtccacagcacaatgccagcgcctttgatgccaacggtttttactgttccggcgatctgatctctattgatccagagggttacatcaccgtgcaggggcgcgagaaagatcagattaaccgtggcggcgagaagatcgctgccgaagagatcgaaaacctgctgctgcgccacccggcggtgatctacgccgcactggtgagcatggaagatgagctgatgggcgaaaaaagctgcgcttatctggtggtaaaagagccgctgcgcgcggtgcaggtgcgtcgtttcctgcgtgaacagggtattgccgaatttaaattaccggatcgcgtggagtgtgtggatagtcttccgctgacggcggtcgggaaagtcgataaaaaacaattacgtcagtggctggcgagtcgcgcaagtgcctgaaggagagaacacgatggctattccaaaattacaggcttacgcactgccggagtctcacgatattccgcagaataaagttgactgggcctttgaaccgcaacgtgccgcgttgttaatccatgatatgcaggactattttgtcagcttctggggcgagaactgcccgatgatggagcaggtgatcgcgaatattgctgcgctgcgcgactactgcaaacagcacaatatcccggtttattacaccgcccagccgaaagagcagagcgatgaagatcgggcgctgttgaatgatatgtgggggccgggcctgacccgcagcccggaacagcaaaaggtggtggatcgcctgacgccagatgccgacgacacggtgctggtgaagtggcgctacagcgcgtttcatcgttctccgctggagcaaatgctgaaagagagtggacgtaaccagctgattattaccggggtatatgcccacattggctgtatgaccaccgcaaccgacgcatttatgcgcgatattaaaccgtttatggtggcggatgcgctggccgatttcagccgtgacgagcatttgatgagcctgaaatatgtggccggacgttctggccgggtggtgatgactgaagaattactgccagcacctatccccgccagcaaagcggcgctgcgtgaggtgatcctgccgttgctggacgagtccgatgaaccgttcgatgacgacaacctgatcgactacggtctggatagcgtgcgcatgatggcgctggcggcgcgctggcgcaaagtgcatggtgatatcgactttgtcatgctggcgaaaaacccgaccatcgacgcctggtggaagctactctcccgcgaggtgaaataatggatttcagcggtaaaaatgtctgggtaaccggcgcaggtaaaggtatcggctacgccacggcgctggcgtttgttgaggcgggagcgaaagttacaggttttgatcaagcgttcactcaggagcaatatccctttgcgaccgaagtgatggatgttgccgacgctgcgcaggtcgcgcaagtgtgtcagcgactgttagctgaaacggagcgactggacgcgctggtcaatgcggcgggaattttacgcatgggcgcgaccgatcagctcagtaaagaggactggcagcagacttttgcggttaacgtcggcggtgcgtttaacctgttccagcaaaccatgaaccagtttcgccgtcagcggggcggggcgattgtcactgtggcgtccgacgccgcgcacacgccgcgtattggcatgagtgcttatggcgcaagcaaagcggcgctgaaaagcctggcgttgagcgtcgggctggaactggcgggtagcggcgtgcgctgtaatgtggttagccctggctccaccgacaccgatatgcaacgcacgctgtgggtgagcgatgacgccgaagaacagcgtattcgcggctttggcgagcagtttaaactcggcattccgctggggaaaatcgcccgtccacaagagatcgccaacacgattttgttcctcgcctctgacctcgccagccatattaccctacaggatattgtggtcgatggcggcagtacgctgggggcataagcatgatctggaaacgccatttaacgctcgacgaactgaacgccaccagcgataacacaatggtggcgcatctgggaattgtgtatacccgtctgggcgatgatgtgctggaagccgaaatgccggttgatacccgtactcatcagccgttcggtttactacatggcggcgcgagcgcggcgctggcggaaacgctgggaagcatggccggatttatgatgacccgcgacggacagtgtgtggtaggcacagaacttaatgcaacacaccatcgcccggtgtctgagggaaaggtacgcggcgtctgccagccgctgcatcttggtcggcaaaatcagagctgggaaatcgtcgttttcgatgaacaggggcggcgttgctgcacttgtcggctgggtacggcagttttgggatgaacccgacagaattagatgagattgcaggaaaactcggttaacggagtgatcgagttaacattgttaagttaaatattggtttcaactccgatttacatggttgctgtgttgttaaattgtacaaagatgttatagaaacaaaatgtaacatctctatggacacgcacacggataacaactatgaacaaaagtgggaaatacctcgtctggacagtgctctctgtaatgggagcatttgctctgggatacattgctttaaatcgtggggaacagatcaacgcgctgtggattgtggtggcgagcgtctgtatctatctgatcgcttaccgtttttatgggctgtatatcgccaaaaatgtgctggcggttgacccgacgcgtatgacgccagcggtgcgccataacgacgggctggactatgtgccgacggacaagaaagtgctgttcggtcaccattttgcggccattgccggagcaggtccgctggtggggccggtactggcggcgcaaatgggctacctgccggggatgatctggctgctcgctggggtggttctcgccggtgcggtgcaggatttcatggtgctgtttgtttctacgcgccgtgacggtcgcagcctgggtgagctggtcaaagaagagatggggccaaccgccggggtgattgcgctggtggcctgctttatgatcatggtcattatccttgcagtgctggcgatgatcgtggtgaaagccctgactcatagcccgtggggaacatataccgttgcgttcaccattccgctggcgctgtttatggggatctacctgcgctatctgcgtccggggcgtattggcgaagtgagcgtcatcggtctggtattcctgattttcgccattatctctggcggctgggtggcagaaagtccgacctgggcaccgtactttgactttaccggcgtgcagttgacctggatgctggtgggttacggttttgtggcggcggtgctgccggtgtggttactgctggccccgcgtgactacctctctaccttcctgaaaatcgggactatcgtcggtctggcggtaggcattttgattatgcgcccgacgctgaccatgcctgcgctgaccaaatttgtcgatggcactggcccggtatggaccggtaacctgttcccgttcctgtttatcaccatcgcctgtggcgcggtgtctggcttccatgcgctgatctcttctgggaccacgccgaagatgctggcgaacgaagggcaggcgtgctttatcggctacggtgggatgttaatggaatccttcgtggcgattatggcgctggtttccgcctgtatcatcgatccgggcgtgtattttgccatgaacagcccgatggcggtgctggctccggcagggacggcggatgtggtcgcttctgccgcgcaggtggtgagtagctggggctttagcattacaccagatacgctaaaccagattgccagcgaagtgggtgaacagagcatcatttcccgtgcgggcggtgcgccgacgctggcggtggggatggcctacattctgcacggcgcgctgggcggcatgatggatgtggcgttctggtatcacttcgccattttgtttgaagcactgtttattctgacggcggtggatgcaggtacgcgtgctgcgcgctttatgttgcaggatctgctgggcgtggtgtctcctggcctgaagcggaccgatagtctgcctgctaacctgctggcaacagcgctgtgcgtactggcgtggggctacttcctccatcagggcgtggtcgatccgctgggcggcattaacactctgtggccgctgtttggtattgccaaccagatgctggcagggatggcgctgatgctctgtgccgtggtgttgttcaagatgaaacgtcaacgttacgcctgggtggcgctggtaccaacggcctggctgctgatttgtaccctgaccgcaggctggcagaaagcgtttagcccggatgcgaaagtcggcttcctggccattgctaataagttccaggcaatgatcgacagcggcaatattccgagccagtatactgagagtcagctggcgcaactggtgttcaacaaccgtctggatgccgggttaaccatcttctttatggtggtcgtggtggttctggcactgttcagcattaagacggcacttgcggcattgaaagatccgaagccaacggcgaaagaaacgccgtatgaaccaatgccggaaaatgtcgaggagatcgtggcgcaggcaaaaggcgcacactaaagtcagagtgagggggggatgttggcgaatgttggcttagtgcccagggttccctctcaccctaaccctctccccggtggggcgaggggactgaccgagcgcgttgatagcatttgtaggccggataaggcgttcacgccgcatccggcactctttcagcaacatggttagcggaggccaagatgtttgatagtctggcaaaagccggaaaatatttaggtcaggcggcgaagctgatgattggtatgcctgattacgacaactatgtcgaacatatgcgggttaaccatcccgatcaaacgccgatgacctacgaagagtttttccgtgagcggcaggacgcgcgctacggtggaaaaggcggcgcgcgctgctgctaaatttgtacgtcaggctttaaagctttccacttttttgaacgctgcacgcaacgtatctggtgtcagcgtgactggcaggtaatgaatggactccaccggacgcagggtgtgggcaatcactttgtcgatctccgcctgattattgatatccacttccagctccgccagtgtagtcggcagatgaaaacgctgatacgctccagttaattgcgccagcacatcatcctgacccagcaaggcgctttgcaccagaattccgtaggcgactttggtgccgtggagaaacttctcggtttgcggcagcacggtcagaccgttatgcacggcatgagctgccgccacacgcgtaaaacgatcgcccagaccaccaaccatcccaccaccagcaataatagcatccaccacatcgcaaaaactttgcgttaactgttgattttgctgatcgctcagcgcctgttcgctactgtttaacaagacgtcgcgaatggcttgcgcattattgatccccagtcgcacggttagcggcaacgtttctggttgcggagccagcaccaccgcttcataccatttcgccagcgtgtcaccgatccccgccagcagatattgttgcggtgcattgaggataatctccggttccaccagcaccataaaattggcgtcgtcgaaaatctcataatgcagcgcctgtccggcatcattataccagacggagagcggtgtccaggcggcgcaggtggcggcgatcgtcggaacggcaacaaacggcagaccgagacggcgggcgagggctttcgcggtgtcgagcagtgcaccgccaccgacgccaatcaccacgctgcggtcgtcaccggactcagccgccagttgttgtacatcgctttcgctgcaatgaccgcgaaacaaaatatgctttgcccctggcagtccaaacgctggcggaagtttggtttgcgccgcagcaatggcgcgtttgccgtagatccacaccgcgcgagaaagttgttcatcagtgaaaaaatcgtgcaggtgattgaaacttcctggatgactaaagtagttagccgggccgacgaccacgcggataggattgtgaggcatgttgtgttgtccttattgttttatttagacatctaaacgtcttgattgccaaatactagcatcgtgttatagtgccttcaacacgcaacttcgtcaggtacaataaaaatgacaaataaccctctgattccacaaagcaaacttccacaacttggcaccactattttcacccagatgagcgcgctggcgcagcaacaccaggcgattaacctgagccaaggctttcctgattttgatggtccgcgctatttacaggagcggctggcgcaccacgttgcacagggggcaaaccaatacgcgcccatgaccggcgtgcaggccttgcgcgaggcgattgctcagaaaacggaacgtttgtatggctatcaaccagatgccgatagcgatatcaccgtaacggcaggggcgacggaagcgttatacgcggcgattaccgcactggtgcgcaatggcgatgaagtgatttgttttgatcccagctatgacagttacgcccccgccatcgcgctttctgggggaatagtgaagcgtatggcactgcaaccaccgcattttcgcgttgactggcaggaatttgccgcattattaagcgagcgcaccagactggtgatcctcaacactccgcataaccccagtgcaactgtctggcagcaggctgatttcgccgctttgtggcaggcgatcgccgggcacgagatttttgtcattagcgatgaagtctacgagcacatcaactttagtcaacagggccatgccagtgtgctggcgcatccgcagctgcgtgagcgggcagtggcggtttctagttttggcaagacctatcatatgaccggctggaaagtgggttattgtgttgcgccagcgcccatcagcgccgaaattcgcaaggtacatcagtatctgacctttagcgtgaataccccggcacagctggcgcttgctgatatgctacgtgcagaacctgagcattatcttgcgttaccggacttttatcgccagaagcgcgatattctggtgaatgctttaaatgaaagccggctggagattttaccgtgtgaaggtacatactttttgctggtggattacagcgcggtttctaccctggatgatgttgagttttgccagtggctgacgcaggagcacggcgtagcggcgattccgctgagcgtgttttgcgccgatcccttcccacataaactgattcgtctctgttttgccaagaaggaaagcacgttgctggcagcagctgaacgcctgcgccagctttaattatttaaccgtccaggcgcgggaatattgacggtcggcaaacaactcttgcaggccgttaatttgcttcaggcgcagcacttcgtcgctgtccattcccagctctttgccaattttattatcgtcccatcccaactggctaagttcacggacgatttcgctcatggcggtgatttgatggcgtccacgagcgcgattatgacgaatagtcgcggcgatgcgttgattacgcgtaccttccagacaggtcaccggcaaataaccttttaagcgtaattttaaactactactgcctttaccaatttcatggcggtgaaaaccatccacgatttccatggcatttttatccgtatgtgtgaccacaatgggttgggtaaaaccatctatttcaatggatttttgcagcagttttttttcgggtggtgccacgttgtttgggttgtaatcattaggcataagttggctgtttttaacccacagaacgcaatccactggctcttcacgaaaggggctaacctgatggatcgccatgcggatttcattaatcgctttgatgcgatcatcttccggcaagctggcgagaaattgcgttaaatcctgcgttaatcgttgttgcatagtatcccccattcctgacgttttccttttatccgttcgttataacgctgatagttcttgctttttgtggggctaaaacttaatgcccgacaccagtaatcgttattgagtaaaactttgcatatccgccgccaggaggggatatctttcgcgccaatgtccccttgctgggtttgtggaacctcgatgccttttttctgataccagtgcaaataaatggcgattttattgcggtaatgctcagctgttttttccggcatgctattgagcagcaataatgcatattcttgccagtctaaatgttctggcttgaggattttccgatgcccatagaaatgattgtcatgtccggcgtaaatgccgccactttttaccccgctgactcgtgcgcacatagcagcccagcgatccggttcgataacgtgatagagccataatccttgtcgttgctccgggccaaaaggttcgcaaattcgcatatgacgcagaggaacgcctgcctgatacattaggttatacagtgggttgcagagactttgatgatttgcataccaggtccagatatcagccactttccagtcgtaaatggggtaaatgtaccagctatgaccgcctggtgcggccgtagtccagggtttatcgtcggcaaaacgttgtttatttaaactggcgatggcgacaaaacggttgtaggactcatccgcacggatgccgatcatcatcgccgccggacgtttttgactaaaccattcggcaaactcacgtacaaattgttcgaaggtcatgcctggctggtaaaagcagaaaaagtcagggtcggttatcgcatcttggggaggttgacgtacccattcgacatcaggttcccagcactgccattcgggttggtattgactaagggaattttgcgtcgtaagcgggagcgcaacccagtaaaactcttcgatgacatcggtgtacaactcgcgcagggactgaacatagttaatggtgcaagagaattgcgcctcccagtcgataaacaaaacgcagatttttttgcccatttgtcgggcaagttcggctgtcagatgcagcattaaaccagagtctttgccgccagaaaaactgacacaaacgcggggtagggtgttgagtgtccaggtaatacgctctcgtgcagcttccagaatattgagcggaagaggaattttataaatagacatctgaagacgctctctgaacgttacagggtgatcagtgagataagtctgttaattataaagtaaacactgtaaagcagagtgttttatttttcattcgcgctgtgaataaatagatgaaagttatagtagctgtctgtagttatatatcaaaaactctcatttagacggtcaataaatcgggagaacaccaaattatttaaagaagatttattataggaaatgtaaagctttatactaggtaacggatgttctagttttatctcttttaagttaagaaagtcacggtaggaattataaagttcataggggactattcccagtaaatctgtaactgcaatgctattaatgattgtcagcaaagaggaaccacgaaaactgattttgcgattcataaatctctcgtctatttccatttgaatatcatcaacccctgcacttttagatattaattgggtgaactcttctgccataatttgttcataagtgctattgtcagtaattcgtggatgcctattactacaaattagagtattgcgaatcgtatgcaatggcatgcaaatgacggaacggctgatcactggcatttgggtgatcaccagatcggctttgcggtgaaccaacagttcttcagcattctctgcactcatgaggatatcatggcactcaatctcgacagaggaatcttgccgtaggcagcggatcagcatactattattagagcaagaaatgagctgagggccgtagataataaagtttttctttagttcggacttattgactatattaattgtttgttcaaggcctctgagatttttctcaagatggtgatgcagatttaaccctgttgtcgtcggcgcgataccttttccactgcgaatgaataaagggtcattaaattgcgcacgtaagcgttgtaagctctggctcacggcacttggggtgatatatagactttcagcagctttgctaatgcttaaatgctggtaaatacactcaaatatgacaagaagatttaagtcgaactttttcaagtcgtagagattggccatacactactccggttatatttttcttccatgatatattcacttaatcaatgttttttgcgtatatatttttattgattatgtttttttgcttaactcaggattaagtttttctaaaatagcacagccacttagggcagagcgagcaattcatgcttttttaggatggttgaaaagcagggatatagttcaaccatccatgaattaccttttatttattccccataatgatattaagcgttttctgatcgggcaaccccacggcctgttgtagcgtattttccttactcatgtaatagatagccggcgtgacatttgcccccagatcgtccatcagtttctcattgtcacttaacactttcatttgctctgtacttacgtttgcaggcacgtttagcttaagcttgccaccagaggcttcatattgttgccaggtttttgcgggatctttggaggcaagaattgccgctgctgtcgccgggctttctggcttgataaccccaaccaacaatgttcttaattgcactttgccagaatctacccacgggcgcgcctgctgccagaactgtttacaatatgggcagaacggatcggcgaagacgtagacaatgaccggcgcatcttttttaccgtcgaggagccagtgggattgttccatccgttgccacatttcgcgtccggctggtgcgtaaatttctttttcgataagtgtgttactcaggttttcacctttctcgttgtacatgtaaccagagatagcgtgcttaccatctggagtcaggtagatggtgacgcccatatcctgacactttccgagataacctttcattcctccgggggcatcgaatgttttgatgattgtaatgccctgtttttcaatcgcttttactggagcaggaagttcctctgcgaaggcgattgcaggaagcagagccagtaaaagtatcttttttaacattaatttgtccttttcagtcagtgcaaaagtcgagtaaaaggcataacctatcactgtcataggtaagagcttagatcaggtgattgccctttgtttatgagggtgttgtaatccatgtcgttgttgcatttgtaagggcaacacctcagcctgcaggcaggcactgaagataccaaagggtagttcagattacacggtcacctggaaagggggccattttactttttatcgccgctggcggtgcaaagttcacaaagttgtcttacgaaggttgtaaggtaaaacttatcgatttgataatggaaacgcattagccgaatcggcaaaaattggttaccttacatctcatcgaaaacacggaggaagtatagatgtccttgattaacaccaaaattaaaccttttaaaaaccaggcattcaaaaacggcgaattcatcgaaatcaccgaaaaagataccgaaggccgctggagcgtcttcttcttctacccggctgactttactttcgtatgcccgaccgaactgggtgacgttgctgaccactacgaagaactgcagaaactgggcgtagacgtatacgcagtatctaccgatactcacttcacccacaaagcatggcacagcagctctgaaaccatcgctaaaatcaaatatgcgatgatcggcgacccgactggcgccctgacccgtaacttcgacaacatgcgtgaagatgaaggtctggctgaccgtgcgaccttcgttgttgacccgcagggtatcatccaggcaatcgaagttaccgctgaaggcattggccgtgacgcgtctgacctgctgcgtaaaatcaaagcagcacagtacgtagcttctcacccaggtgaagtttgcccggctaaatggaaagaaggtgaagcaactctggctccgtctctggacctggttggtaaaatctaaatttccttcgtctttcacgccatagcggcgttggcgtcgcccgctcaccccggtcacttacttgtgtaagctcccggggattcacaggctagccgccttgctctgacgcgaaatacttcggaaattcacctaattcttcgggtgctgcggcacccgattttcttccccgcaccatgatgcaagctgcatccaggtagccgcagaggccgcttgcatgatgatgtttaaagcccaggagataaacatgctcgacacaaatatgaaaactcaactcaaggcttaccttgagaaattgaccaagcctgttgagttaattgccacgctggatgacagcgctaaaagcgcagaaatcaaggaactgttggctgaaatcgcagaactgagtgacaaagtcacctttaaagaagataacagcttgccggtgcgtaagccgtctttcctgatcaccaacccaggttccaaccaggggccacgttttgcaggctccccgctgggccacgagttcaccagcctggtactggcgttgctgtggaccggtggtcatccgagcaaagaagcgcagtctctgctggagcagattcgccatattgacggtgattttgaattcgaaacctattacagcctctcttgccacaactgcccggacgtggtgcaggcgctgaacctgatgagcgtactgaacccgcgcatcaagcacactgcaattgacggcggcaccttccagaacgaaatcaccgatcgcaacgtgatgggcgttccggcagtgttcgtaaacgggaaagagtttggtcagggccgcatgacgttgactgaaatcgttgccaaaattgatactggcgcggaaaaacgtgcggcagaagagctgaacaagcgtgatgcttatgacgtattaatcgtcggttccggcccggcgggtgcagcggcagcaatttactccgcacgtaaaggcatccgtaccggtctgatgggcgaacgttttggtggtcagatcctcgataccgttgatatcgaaaactacatttctgtaccgaagactgaagggcagaagctggcaggcgcactgaaagttcacgttgatgaatacgacgttgatgtgatcgacagccagagcgccagcaaactgatcccagcagcagttgaaggtggtctgcatcagattgaaacagcttctggcgcggtactgaaagcacgcagcattatcgtggcgaccggtgcaaaatggcgcaacatgaacgttccgggcgaagatcagtatcgcaccaaaggcgtgacctactgcccgcactgcgacggcccgctgtttaaaggtaaacgcgtagcggttatcggcggcggtaactccggcgtggaagcggcaattgacctggcgggtatcgttgagcacgtaacgctgctggaatttgcgccagaaatgaaagccgaccaggttctgcaggacaaactgcgcagcctgaaaaacgtcgacattattctgaatgcgcaaaccacggaagtgaaaggcgacggcagcaaagtcgttggtctggaatatcgagatcgtgtcagcggcgatattcacaacatcgaactggccggtattttcgtccagattggtctgctgccgaacaccaactggctcgaaggcgcagtcgaacgtaaccgcatgggcgagattatcattgatgcgaaatgcgaaaccaacgtgaaaggcgtgttcgcagcgggtgactgtacgacggttccgtacaagcagatcatcatcgccactggcgaaggtgccaaagcctctctgagtgcttttgactacctgattcgcaccaaaactgcataagaagaagtaagattcacctgcaattgcttagccgccggggtcaaacctggcggcttttttatggcattaaaaagccccgccgggatggctccgggcagggcgggatacttattctggcaattaacgcacaaccagcaccggcagattggcgtggcggatcacgctgctggcgttagaacctaacagatgggtgctaatgcttgggttgcgagaaccaataactacaacatcagcccccagttcttctgccaactcattgacttcatcccgcacgctaccaaaacggacatgttgtttaatgcgggaaggatcgatggtgaagtggctgaccatcgtttgcagacgttcttgtgcttcatgttgcagatgctcttcaaaacgacgcacatcagcggcaaaacggtgcaggctcaggctggcactcccgggtagtacgtgaagtagatgaataactccgtcatcctgggcgaggaattcagcgtggcgaacagctttgtcgctcaattccatttcaaatacatcaactggcataatgattgtcttatacataaccctttctccctgttaatcatgaacaaatcattcgccatgattataatatttatccctgatatttgtctggttctttttccttacgaactgtttctgtgatgaatatattctcactgaacaccaggaattctcccaaaacctgtggtaccgcccgttttcccgctgtgatagctacccttaaagactgactcttttttgaactgtctctggaggttgcatgaaagcattgacttatcacggcccacatcacgttcaggtagaaaatgttcccgatccgggcgttgaacaggcagatgatattattctgcgtattacggcaacggcgatctgtggctctgacctccatctttatcgaggcaaaatacctcaggttaaacatggcgatatttttggtcatgaatttatgggggaagtagttgaaaccggaaaggacgtaaaaaatttgcaaaaaggcgaccgagtggtaattccgttcgtcattgcttgtggcgactgttttttctgtcgattgcaacaatatgccgcctgcgaaaataccaatgcgggtaaaggcgctgcgctcaataaaaaacagataccagctccagcggcattgtttggttatagtcacctgtatggcggcgttcctggtgggcaggcggaatatgtccgcgtccctaaagggaatgtggggccgtttaaagtaccgcctttgcttagtgatgataaagcgcttttcctttctgatattctgccaacggcatggcaggcagcaaaaaatgcgcagatccaacaaggtagtagcgttgcagtctatggtgctggtcctgtgggattgttgacaatcgcctgtgcacggttgctcggtgcggaacagatttttgttgttgatcatcatccctaccgcttgcatttcgccgccgaccgctacggcgcgatcccgattaattttgatgaagacagcgatccggcacagagtattattgaacaaacggcaggtcaccggggcgtggatgcagtaatagacgccgtcggttttgaagcgaaaggcagcaccacggaaacggtgctgactaacctgaaactggagggcagcagcggtaaagcgttgcgtcagtgtattgcggcggtcaggcgtggcggcattgttagcgtaccgggcgtctacgctggatttattcacggtttcctgtttggcgacgcctttgataaagggttgagctttaaaatgggacagacccacgttcacgcatggctgggagaattattaccgttaattgagaaaggattactgaaaccagaagaaattgttacccactatatgccgtttgaagaggccgcccggggatatgagattttcgaaaaacgtgaagaggagtgccgtaaggtgattctggtacccggtgcacaaagcgcagaggcggcgcagaaggcggttagtggtctggtgaatgcgatgccggggggaacaatatgatcgtcaggagtggttttcgaggtaaaggacagccatgacgataatcgccgccataatcagaaatcctatcaggatgtaaaatgcttctgccatggttattcccacaaacgaaacggaataattttgcagcaaaagtgaacagtgagaaccaggaaaaattgctgattttgcgtaaagaggatgcgagtgcatcctctgggcaaagcgagttatcgcttgtgcagatgggattaaagcaggtagtcgccagcagcttctggctggtattcgagttccagcacttcaaggtgggttgcaacgccgcccggaagttcccagtgaatggaatcgccaacgcgcagccccagcagtgcggcacctaccggagccataacggaaagctgagtattgctatcggtcatttttgccggatacaccagcgtgcgcacacgcacttcgccatcgctaagattgcggaatttaacccggctgttcattgtcaccacgtcgtgtggcatctcttctgggctacacatttgggcgcgatccaactctgcgtttaacgcgtcggcgattggcaaaccagcataggcgggttgctccagcagaatatcgatgcgttcggcatccaggtcgttaatgatgatagttggtctggacatttttactccatgtcgtcggtgctgcgagtgtcgcagataaacatacccaaaagaaaaccctcaccgtcaggcggcgagggtttaactcacatgatgatactgactgttgctcactctttgaagtgatttgcgtcacattcagggaattcctcaatgcagcgcattatgtataaatcttaatcgccttggtttatggaagacgaattagcgtgttttgtaaatcagatgattaataacccgctttatcaatcacaaaggttttgccacagttacctgggtgaggttgtggcaagaaactgtttgcagaaagcggagcgttgatggcgtcagctttgatgctgatctgaatttcagtcaaatacgcagggttaccctggcacgttagcttaactgctttcacgttctcttttccccagcttttggcaaaggcggcgtcaaagtcacggcggctcactgttttaccgtaattatccgcaaggaattttccggcttcgctctctttaatttcttgattcaggcgtaccatcgtaccgaagtatgcgtccggatcaaaaccaaagcaggcaccgtgtttggcatattcgtagcgttccaggcaggaacgtccgccagctcctggcatgacttcacttagtttagcggccgtttccagacttaatccggtttccgggctactacacattcggctggcgcgcgcttctggtagattcgggattgggcgagtagcgcaaccgaagcgcatccagcggcgttcatcaacaccacgggcagcaacgcttttaggcaatcctggccacagaccatgtacggtcagaaaatcagctttgttggtcgtttcggtttgcaggcgacattcatctcgttcgttacgatttcgatcgtgttgactctggcaaaatccggtttgccaggagagggccaggacatagcgatcaaaatcgccatactgttttgcctgcaacgctaaggcgttggcagaagagaagggaagcagagaaaccgcgagcaacgcggcgttacgccagaatgctttcataatgggtgtggaactcatacatacactgaatactatctattaaatcataaaaaagcccgccaggtgggcttacctggcgggcgtgatgatttattcagcgtttggcgaacgtattagttccacatggcgagaatcggccagccaaccaacagcaacatagagatgtaaatcaccccgaagattgcgccaagacgccagtaatctttacttttcacatagccacagccgtaaataatcaccccaggaccggttgcatacggcgtcagacagcccatgataccgatagacagcaccagcaggatacacagttgttccattggtacgcccggaatacctttaccgacggccagaataaccggcagcatggttgcggtgtgcgcagacaggctggcaaacaggtagtgtgcaaagtagaacaccagaaccagtacaatcaccgttgcgtttggactgaatccttccaggtgcgtactcatggtaccggcgaaccagtcaataaaaccagaacgagtcaggccgttagccatcacaaccagagttgccaggttgaccagtgtgttccatgcgctgttatagcgggtaatgtctttccaaggcacaacgtgcagggccagcattaggctaactgccagcagaccaaccgcagtagcattaatgacttcactgccaaatacccacaaacctaagctgagcaatacaaggccaatcagtgtccactctctgcgtgtcagcgcacccatggttttcagttcatcacccgcccaggttgccacttcttcactgtgtgtgatttccggtttgtacagcacgtaggaaagccacggcgcaatgataagcaagataaccccaaccggcaggaagcagaggaaccactgcaaccagctaatctggataccggcaattttgctgacgaactccagacccagcacgtttggtgccgcaccggtgacaaacatggagctactcagactggtactaatgaccatcatccacatcaaatagccgccaatacgacgcgcggacggatcgttcgggaaacttttaaacaacggcggcaggtttttaatgaccggaaaaaccgtacccccggtacgcgcggtgttggaaggtgtaaacggtgccagcagaatgtcgataatgacaatcgcataacccaacgtcagcgtgcgtttgcccatgaatttcaccaggaaaagggcaatgcgacgacctaacccggaaacttcataccctaatgcaaaaataaatgcgccaaataccagccataccgtggtgctggaaaaaccagccaggccccatttcagcgcctgtttttgcgcattaaacgctgggtcagctaattctttggcatcaaagagcaggtaattactgccaataacgcaaatagtaaccgcaataaaactgatcgctgttgccggaattggctcgaggatcatgccgacaatcattgccacaaacacagcgaagtaatgccatgcctgcggcggcataccgtcggggacagggataagaaacatgacacccatcaccaccagtggggccaatagtttccatatattatcttttgctaaagacatacgggttctccgaaaattaatatttccaaatttatcaagtgcttaaataattaaatctgtgctaaaaaccaggtaaggatcagtaggtcagcactgccgcctggactgagatttcgttcgatacactccctgtcgaactgccggagataatcgagatcggcgggggttcgaatgccccctttttgcaataatgtttgcgcctcgcgctgtagccagcgcaggcccccctcgccaccgcggcttgcaacgttggtatcgccgttgatcgccatcagtaggagcaaggtatcgagcaatgccagttcaggatctaacccctgatccagcagagtgaggtaatgcggcaaggcgtgattgatcaccagtggataacccgcttcggcttcaccgcgtgcgccggtaaggccaagctgttggtacaaccgttgacctgccgtcagttgactattattggtacgcagttcgcgatcggtcaggccacggcagaaacttgccgccgtagaacaaacggttgttggcgttaccggttggttgagttgaagcaaacggccaattgccgcacatagcagccctaaagaaaaaatgctgcctttatgcgtgtttacgcccgcagtggcgcggaacatatcaccttcgcaagccataccaattgggcgtaatccgtggagtaccgcttctggtgccatttccgcactacaggcaccaaattcaatgaaacggggtagccagccctgaatcgccagcgcgctgcggtggaaatcttccagcgccatatctttgtgcgcaccgcagttaatgcgatccacgaggcctggtttcggactcagattgacttcagtcagcatggcgcgccagcccagcagggcgtactcatcgattaaactcgtcgcaagctttgtggttttagtactcgttgcaggcatgctcatcgttcagcagtgcctccatgttatttagttgacgttgcaggcatcgacatcgttcagcagtgcctccatgcggttgagtaaatcggtcagttgatgggtttttccacgcgcgcagacggctgcgctttgttcgcacaacaggcagcggcgaggcggcagactatagtcgcggcgggagagaatttcgccttcgggcgtcaggacatcgatatcccataaccgcccgagaggatgactatgttcaagctcaatggtggcgagcttgaggtcgcgagccggggcggcaatgctcaacatgccctccggcccgctggcggaaaccagtgcagcctgctcctgaatttgccagccctgttttgcggctaaggcacgcaaggctgtcacgccatgattaaaaattcggcgtgtgacctcgctgtctttaatcggcccaggcgcaaccacggtaaaggagaccagtggaacaggatggcgcttgagccagacgtgttgccgtgcttgcctttcatcccggctgacgagcagctcgggaatacttaccgcatggtggctggcgagttcaggaagcaggtgcatggcttattccttcacctgatgcacaacatcgatcacgctgccatcgcggtaacgcacaacggcaacgacgcggtctgtgaattcaatcggctgtggttcaccggtcagcagacgcgcacgttcgcgcagccactcaatggaaaccactttaatgcccgcttcctgcagacgttctgccagttccggacgtgccgggttaactgcgataccgtggtctgtgaccagaatatcgacactggagcctggggtgatgcaggtcagtacgttatccaccagagtcggaatacgaccgcgtaccagcggcgcgacgatgatggaaagcgcagaggcaatcgcggtatcgcagtgaccaccggaagcaccacgcagtacgccgtcagagccggtcagcacgttaacgttgaactgggtgtcaatttccagcgcgctcagtaccaccacgtcgagacgatcaacgcttgcgcctttgctaccccagttagcgtactggttggcgctgatttcgatgtgattggggttacgggccaggctttgcgcagcatggctgtcaaagctctgcacatccagcagtttgcggatcagacctttttcgtgcaggtcaaccatcgtcgcggtaataccgccaagggcgaagtcggcgcgaatatcgcggctacgcattttgtcttccaggaaacgggttaccgccaggcttgcgccgccggtgccggtttgcatggagaaaccttctttgaagtagccagagttgacaatcacatccgcagcgctacgggcaataagcagttcgcgcgggttagtggtcatacgggtcgcgccagcgccgatttttgcagcatcgccaacgcggtcaactttgacgatcaaatcaacctgatcttgctcaatgcttgccggattatgcggataaggcagcagttcttcggtaagcatcacgacctgttttgcgttgtcggcatcaactattgcatagccgagggagccgcagcaggctttaccggtgtagccgttggcattaccgaattcatcacaggacgggacgccgaggaaagccacgtcgatattcagttcgccgctctgtaccagatgcacacgaccgccgtgagagtggatctgcaccggttctgccagcagaccacgggagatctcttccgccagtggaccacgcaggccggaggtataaatgcgggtaaccacgccctggcgaatgtgttctaccagcggcgcatggcaatcactcagggagctggacgccagggtcaggtttttaaagcccatcttcgcgatgacgtccatcaccatattgacggtcaggtcaccgccacggaaagcgtgatggaaggaaaccgtcatgccgtcctgtaaaccagagcgacgaatcgcttcttccaggttggcgcacagtttgcgatcgcgcgctttttcagcctggtaggtttgctttgggctgttctggaaagcggcaagatcgcattcagcgcgacgattccaggccgctacccgttcttgtcgttgagattgttcaattttctgcgtcattttgattgccttattcttcgcggatgccggaaagttctgcacgggagagcaccagacgggcgcgatcgataaccggaccgtccaccatcttgccgttcagggaaaccacgccgaggccttcgcgagcggcggcttcagcggcttctacgacgcggcgggcgtgatccacttctttctgggtcggtgcgtagaggttgtgcagcagatcaatctgacgcgggttgatcaggcttttgccgtcaaagcccagctgtttgatgtgggcggcttcttgcagaaatccggcttcgttgttagcgtcggaatagacggtatcgaacgcctgaatacccgcagagcgcgcggcctgcaaaatggaacagcgtgcgaacagcagttcagttccttccggggagcgttctgtacgcaggttgcgcacatagtcttctgcaccgagggcgataccgatcaaacgctcggaagcgtgagcgatttccactgcgcgggtaatccccagcggagattcaatcgccgccagcaggccggtgctgccgggttcacgaccacaggctttttcgatacgcaggatctctttttcaatatccagaacatcctgagcggtatcggttttcggcagacgcacaacgtccgcaccaccgcgaacgacggcttccaggtcgttaacaccccattcggaatccagcgcgttgacacgcacaatggtttcaatatcgcgatacagcggatgttgcagcgcgtggtaaaccatgcggcgggcggtgtctttttcacgcaatgctacggagtcttcgaggtcaaacatcagggcatcagccgggtagatgaaggagttgctgaccatcgcggcattggcaccaggcacaaacaacatgctgcggcgggtgcgagttttacgttgttgcaggctagcggaaatcattggcaatcctcccatggcagagccgggataccgctggcgcgtgccagcagggcttccagtcgtgcacgtaaaatgcagtacagtgcgcctttgtcatcgacattcagctgtacgccgcgcacgttgtagcgggcgagaacgtccagaatggtggtgcgaattgcatcgccaaactgtttctcaacgctgctattgatttgcaggtcgatatcctgcgtatcgagtggggcgatgcgtatcatcacatccccagactcaagggtgcctgcaacggcgggctggtttattttcatttttcacctgtttctcatgcgggggtcttttgacgagctgccgcgtcctggcgggagtgctcaagcaggttctgcaaataatgcagcgtgactgcagggaccagcggcgcgatagccgtgagatcgtttttcgccagcagttgacgtacccgggaagcggatatcggcatctcctggtaacgcagccgctcaatttcaaccagttcgatgggcggtgcggagatagtcggcgtttccagccagtagcgcatatcctggttgtactgggcggtaacgcgacaaaagggttcagtaccgacaaagcggtgagttacacccagcgcgggagcgaggtactgacggaaaatcttcagatcaatttcggtgtaacaatggttaatgacgctctgttctttaatgaagtagcaagggaacgtagcgcgggagatgatgtattcggagccacgatgcacagtcaggcgtggaatatcggcggtgccttttaacaccaaatccagccggtcttcataggggaagcgactagaatcttctttgactaaaaacagatgcaaccagtcgcactgtgccgcagcctgttgaatcagataacggtgaccattcgtaaagggattggcgttcatcacaatgcagccaatcttgttccctggatgacgaaattttttcaggctttcggcatagcgtttcagtcgcgtggcgctgttttccatcagcaccatcacgccgggtacgctggtcagcgtggaaaaaccgcactggcggaacagcgcctcgtattcggttttggtataaataaacagatgcgtgctgtgccgctcataggcgaggtttatcaattcagtggctaatgtcagcgccagtccttcaccgcggacggattcactgatagcaacgcatttaataatatttccggcaattccaccgcacgcgataagcttttcatcgcgggttacggtaataaatacttcgactgtggtgtcaacgctcaaatcattttcatgcaggaattgggcgatttccgccatttttttattttcactacgttttacgcgggtgaaaatatcattgccgaacataataaatagtatcctgaaggtgcatgttgttatcgatttgcaacgaatgttgttcaatgttgcaaactgataaccttttattttcacttgggagaaagggggtgatcgaggtatatctttttctcctttcgctatacatcctaaggagtatttcggcgtgaaattttgatttatttcacatagagttagtggttttttatttatttaatgattttaagttttttaattaatgtaattacgaaatgactcgcaggtttaagtgatttaattgatttaatgaataaaatttgccacgatcataattaatatctatgtattttgattcaacattttaattacatccgtcaaagaggctcgggacaacccgcaaggaaaacaatgttgcagcttaacgagaataaacagtttgcatttttccaaagactggcatttccgctgcgtatctttttgctgattctggtgttcagtatatttgtcattgcagccctggcgcaatattttacggccagttttgaggactatttaacgcttcatgtacgcgacatggcaatgaatcaggcgaaaattattgcctccaatgacagtgtcatctctgcggtgaaaacgcgtgactacaaacggctggcgaccatcgctaacaaattacaaagagataccgattttgattatgtggtgattggggaccggcacagcatccgcctttaccatcctaatccggagaaaattggttatcctatgcagttcaccaaacagggcgcgctggagaaaggggagagctacttcattaccgggaaagggagtatggggatggcgatgcgcgccaaaacgccaatctttgatgacgatggaaaagtcatcggcgtggtgagcattggctacctggtgagtaaaatcgatagctggcgggctgagtttttattaccgatggcaggtgtgtttgtcgtgctgttagggattctgatgttgctgagctggttcctggccgcgcatatccgtcggcagatgatgggcatggagccaaagcaaatcgcacgcgtggtccgtcagcaagaggcgctgtttagtagcgtttatgaagggctgattgcggtggatccgcatggttacattaccgccatcaatcgtaacgcaagaaagatgctggggctgagttcccccggacggcaatggttgggtaaacccattgttgaagtggtcaggcccgccgatttctttaccgaacagattgatgaaaaacgtcaggatgtggtggcgaactttaacggtctgagcgttattgccaaccgggaagctattcgtagtggtgatgatttgctgggggccattatcagctttcgtagtaaagacgaaatttccaccctcaatgcgcaactgacgcaaataaaacaatacgttgagagccttcgtacattgcgacacgagcatctcaattggatgagcacgctcaatggtctgttgcagatgaaagagtatgatcgcgtgctggcgatggtgcagggggagtctcaggcccagcaacagcttattgacagcctgcgcgaggcgtttgccgatcgccaggtggcggggctgctttttggtaaagtgcagcgcgcccgggaactggggctaaaaatgatcattgtccccggtagccagcttagccaactgccgccaggactggatagcaccgagtttgcagccattgtgggcaatttacttgataacgccttcgaagccagcctgcgtagcgatgaaggaaacaagatcgttgaattattcctcagcgatgaaggcgatgatgtggtgattgaagtcgccgatcagggctgcggcgttccagagtctctacgagacaaaatatttgagcagggggtcagtacgcgtgctgacgagcccggtgaacatggcattgggttgtacttgattgccagctacgtaacgcgctgcggtggtgttatcactctcgaagataatgatccctgcggtaccttatttagtatctatattccgaaagtgaaacctaatgacagctccattaaccctattgatcgttgaggacgaaacgccgctggcagagatgcatgcggaatatattcgtcacattcccggattcagtcagatattactggcgggaaatctggcgcaggcccgaatgatgatcgagcgttttaagccggggctaatcttgctcgataactatcttcctgacggtagagggattaatttactgcatgaactggtgcaggcgcattatcccggcgacgtggtgtttaccactgcagccagcgatatggaaacggtgtctgaagccgtacgttgtggtgtatttgattatctcattaagcccattgcctatgaacggctggggcaaacgctaacccgtttccgccagcgtaaacatatgctggaaagtattgatagcgccagccagaagcaaattgatgagatgtttaatgcttatgctcgcggtgaacctaaggacgagctaccgaccggcattgaccccttgacgctaaacgcggtgcgaaaactgtttaaagagcctggtgtgcaacatacggcagaaacggtggcgcaggcactgaccatcagccgcaccactgccaggcgttatcttgaatattgcgccagccgccatctgattattgctgaaattgttcacggcaaagttggcagaccacaacgcatataccacagtgggtgacatgataaagccggaggaaacttgcctccggcattactatttacttgcctgtgaccgctgctgccgttcctggcaccatcagctctgtagcaacgataacaatcaccaaaccaacaagcaccggtacgctggtgcgttttacgacttcaaacgggctgatcttcgccatcccggcaaccgcaacgactacgccagaaacggggctaagggtacggccaaggttactcgcctgcagcatcgggatagtcaaatacgccgggttaatgccggaagagtgcgccagtttcgggatcatctcaacaaacgcataaaacggcgcattgccactaccggtcgtgactgccgccagcattgtcagaatcaccaataccagcatcaggatgatactcgcgctaccaaagctggtagcgatagaaatcagactttgaataaagccgatggtgctaagcccctgagcgaataccccagcggcaaccagcagcatcaccacgttagcaaacgcatctgccatcccgcgataagccacttccagaccagagaaaactttctgggtattaaagctgcggaggaactccagaatggaggcaatcagcatacaaatcaccagaatagtgatgatgtgtaattgcggaccccatttaccgtcaaaaatcagtacaccgatgatcggcgtgaacggcaaaatggcataaaacgcaggagcagtggtggtgatttcactgacatctaacatttcatgagagatgtgctcttttttatccagataacgttgccagaagaagtgggcgatcgccatgccgataattgcagcaatactgataggcagcgtcgttttgaaggcgaagtcaatcaggctcatttcggaagcttgcgccgccagcaccacatccccactagtcggtgcgagaataatcgccgccggggaggcacaaatggcagcagctgcgccacgactgataccaacgtttaccatcaccggaaatagggttgccatcagcaaaacacccagaccggttgcggaagagacggccagagacatcagacaggcgacaaaataggcggcaatcatcagcaggtaaggggagttaatatactgcaatggtttactcgccagcttgaccaccatatcattcgcgccgatatgggtcatgtaagcggcaaatccacacagcatcataatcatcatgccgaggtcgccgccgcggctcattagtaatattttaacgtattcaacgatatccgtggcgctgtagcctgtactagcctggctggacggtaacactttgtgccccataatggcactgataatcagcaataacaggccaccgacaaataacacaccagtggcggaataccctttaatgatgtagcgagctacacccacaataaccacaaccccaataaggagctcaatgaatgtcagcataatttttcctgtctccaggccccaaagtaaataataaaaaattcctaaagcttaaggaaaaaatatgcccaataaattggcgatgaatgctgattaaaatcaagaaaaactgccattaagacattgaagttgctgtttttatacatagataacaaaacgcatatttagcggttggcaattatcacataataatgtgtgcaaattgatggtggattgatgcaaatttgttaattgcaatggtgttagctgcggctgtgcgctcaaaaaataatctaatatgagcataggttgacgatatatattatatacttcgttaagatgattgttgtatctcgttaaaaaataaaataatttttccttgattgcattttgtcatcaaaaaagacttggtttttcttttttgactattcccatcgcagaaaacgacgcatcatctttaatcgatgcgcggaaatatttaacttgaacaagcggaaataaatagagcagctattcagattattctttatgttgggtctattaaggttatgttaattgtagctttgctatgctagtagtagatttttgataaatgttttatggtcacaaatgaacgtgagtaaatatgtcgctatcttttcctttgtttttattcagttaatcagcgttggtaaagtttttgctaacgcagatgagtggatgacaacgtttagagaaaatattgcacaaacctggcaacagcctgaacattatgatttatatattcctgccatcacctggcatgcacgtttcgcttacgacaaagaaaaaaccgatcgctataacgagcgaccgtggggtggcggttttggcctgagccgttgggatgaaaaaggaaactggcatggcctgtatgccatggcatttaaggacagctggaacaaatgggaaccgattgccggatacggatgggaaagtacctggcgaccgctggcggatgaaaattttcatttaggtctgggattcaccgctggcgtaacggcacgcgataactggaattacatccctctcccggttctactgccattggcctccgtgggttatggcccagtgacttttcagatgacctacattccgggtacctacaacaatggcaatgtgtactttgcctggatgcgctttcagttttgagacaaatgaagttttagtaacttctttaaaatcaatagctaaaataagtaacatcaaaaataacgcgacttttatcactttttagtaaagttacactggacaaagcgtaccacaattggtgtactggtaaccgacacagcatttgtgtctatttttcatgtaaaggtaattttgatgtctaagattaaaggtaacgttaagtggtttaatgagtccaaaggattcggtttcattactccggaagacggcagcaaagacgtgttcgtacacttctctgcaatccagactaatggttttaaaactcttgctgaaggtcagcgcgtagagttcgaaatcactaacggtgccaaaggcccttctgctgcaaacgtaatcgctctgtaagatacgtcagcaagaattcaaaacccgcttaatcagcgggttttttttggtctttagtgtgcggtactggcgctaaacagccagaatgccagtgcggtcatggcaaaagaccccagaaggttgacgaaaacgttcagtaatgcccagccaaagcggccctcttgtaacaaaaacaccacttctgcgctaaatgtactgaaggttgttagaccgccacaaaatccggtggtgattaatactttccacactggatcaatgttcgtcatcctgctgaaccatgcgaatcctattcctatgatgaatgccccaatcaggtttgctgtcagcgtccccaacggaatcgcctgatgcagtgggttaaatcgcatacttaacagccatctcgccacgcttcccgtaccaccgccaataaaaactgctaaaagaagttgtaacactgcaaaatcctgctatttgatttgtatgagtgataagtgtaacgccgaataatcgtcgttggcgaattttacgactctgacaggaggtggcaatgctggttgccgcaggacagtttgctgttacatctgtgtgggaaaagaacgctgagatttgtgccagcttgatggcgcaggcggcggaaaacgacgcaagcctgtttgccctgccggaagcattgctggcgcgcgatgatcatgatgcagatctaagcgttaaaagtgcacagctgctggaaggcgaattcctcggactttacggcgagaaagtaaacgtaacatgatgacgacaattctgacgattcatgttcctagtacgccggggcgcgcatggaatatgctggtggcacttcaggcaggaaacatcgtcgcccgttatgccaaactgcatctctatgatgcatttgccattcaggaaagtcgccgtgttgatgctggtaatgaaatcgctccgttactggaggtggaagggatgaaggtcggtctgatgacctgttatgacttacgctttccagagctggcgctggcacaggcattacagggagctgaaatcctggtacttcctgccgcctgggttcgcgggccgctcaaagagcatcactggagtacgttgcttgccgctcgtgcgctggataccacctgttatatggtggcggcgggggagtgcgggaacaaaaatatcggtcaaagccggattatagatccctttggcgtcaccattgcggcagcgagtgaaatgcctgcactcattatggcggaagtgacgcccgaacgtgtgcgtcaggtgcgcgcgcaactgcccgtcttaaacaaccgtcgctttgcgccgccgcaattattatgatgtttttttactcggcgcttgattcaccttgttacagattgctattgtgtgcgcgcgtcgaatgaccgttaatattctctggtttttaaggcgcgttctgttgccggttatatgtcaagaaggtatctatgggtgagattagtattaccaaactgctggtagttgcggcgctggtcgttctgctgtttgggactaagaagttacgtacgctgggcggagaccttggagcggccattaaagggttcaagaaggcgatgaatgatgacgatgctgcggcgaaaaaaggcgcagacgttgatcttcaggctgaaaagctctctcataaagagtgacgtggcgagcaggacgctccctcaatatcttgttcgatacaaaaaacccgcttcaaaaagcgggttttttatcagacagatgtaagtaattattacaggattacttaacttccatccctttcgcctgcaaatcggcgtggtaagaagagcggacaaacggaccgcatgcagcatgggtaaagcccatcgccagcgcttcggctttcatttcgtcgaactcatccgggctaacgtaacgttgaaccggcaggtgatggcggcttggctgcaaatattgccccagcgttaacatcgtcacaccatgacggcgcaggtcgcgcattacctcaataatttcttcattggtttcacccagtcccaccatcagaccagacttggtcgggatttccggatgcgcttctttaaagcgttccagcagcttcaggctccagttgtaatctgcaccaggccgtacctgacggtaaatacgcggtacgttttccaggttatggttgaacacatctggtggcgttgcagtcagaatatccagagcacgatccatacgaccgcggaaatccggcaccagagtttcaattttgatttgcgggcttttttcccgaatggcagtaatgcaatccgcaaagtgctgggcaccgccatcgcgcaggtcatcacggtcaacggaggtgataaccacataacgcagcgccatatcggcaatggtctgcgccagtttcactggttcattggcatcaggagctaccgggcgaccgtgggcaacatcacagaacggacaacggcgggtacaaatagcgccgaggatcataaacgttgctgtgccgtggttgaagcattccgccaggttagggcaggaggcttcctcgcagacagaatgcaggccatttttgcgcattgcggctttgatgccctggatacgtgtagagtccgctggaagcttgattttcatccattccggcttgcgcagcagggcttcgcgctctgttgccacgtttttaaccgggataagggccatcttatcggcatcgcggtatttaacaccgcgttccatcacaatgggtttactcatagcgtgcgtgttccagttgcgaattacgaaggaaagcgtttcaattcaatagattgttgtaattatcaactatttttgaattaacgactggcagtatatcattgaaacggacctgaaagcagccaaagcggtcgcgaaaatgtaaaattgttgttggattgtgccattttatcgttctgcgctgtgatctggctgtaacaatactttttcaaaatgcattacggataacatctattactccgtgcaggatgggatcacgcaggctgaatttgttgtagtggatagagaaatctatttgctcctcatttaaggacggaaaaggcagtttttccagcggccagcagcggctaaacaggttataaaaacggctgggaataatcgctaacatgtcactgttggcaaccagtgcagcgattgtcaaaatgttgtagctggtgaaattgatttgccggtccggaaacatttcttgaactctctgccgcagaccgctgaaattttgctcttccggtaacagaagtacatgcgcagcgttgtcgatagtctctctgtcatcttctaaagagagtagtggatttccctcgcggcaaattaacaccatattgtcggtgaacagaacatgatgttgcaccgtacgattggtgcaaaacatgttatcgatgatgagatcggtttgaaactgactgagttggttttccgcgtcgctgatgggcgggttgcgcagtaaaagctgcggatagtgagttttaatcgcccgatagatgacaggaaggaccagtgctccgacgctgggagtggtcgcaatagttatcgttcgttgcttatcatagcttccttcgatatccagcgcgccaagaatggactcaaggccctgactgatatactcatgtagatgcatcgcaaatgcggtaggagtgacaccctggcctttgcgaataaacaatgggtcagggaatataacgcgcagtttctgaatagactgactgattgcgctgggggtcagattaagcactttcgctgcattaacgatccctttatgtacatatacagcttcaaaaatagtcagaaggttaagatcaatatttcgtaaggttgtaaatatttgtggtttaccttcactgctctttctgcttaaacagggttcaatttgattattactatccacgcacttactccaattttattcatggaaaaataatatttaaaaaattacaataatcttatgtctaattggaacggaacgcttttgctcaccataatcaactatttcaataggttaatcaatggggtgagttacggagcaaggcgtggcaccgcatttctgcaagtgataaagaaaatatacaaacgcgaaggagatgtaaagcattagcagatattatgagtaatgacccagtgtaaattgggccattgatgtatggaattaagcggtaatatattcgaagtccggattgtttagtagcgctaaaatattttccagtaaacgtggagcaatattattagtcgtcgcttcgggtttccattgacttattttagccatttccattccggcatacccacaaggattaatacgtaaaaatggactaagatccatattgacgtttaatgccagaccgtggaaactacaaccgcgtcgaatacgtaaacccagactgcaaattttcttttccccaacatagacacctggcgcgtcagcccgaggatgcgcttctatacccagttcagccagggtattcaccactgtttgctcaagcaaggtcaccagttcacgcacaccgagtttacggcgtttcaggttaagcaacacatacatcacctgttgccccggcccgtgataagtcacctgcccaccgcgatcgctctggatcaccggaatatcacccggcattaaaatgtgctccgcttttcctgcctgaccttgggtgaataccggatagtgctcgaccagccagatttcatcaagggtactatcatcgcgggtatcggtgaattcatgcatagcctgggagattggctcgtaaggctgaagaccgagctggcggacaagaattttatcctgatacaaaacggcatctccgtggagaatgagtaaaagtgggggaaaagtatatcacagcgaggagaggggagttacccgaccaggagccgggtaacggagaagcgagttacagaaccatgcggacaatatcgattttgcccagttcttcatacagtgtttcaacctgctcgatatgagtggcgttgatagtgatagatacgctgtggtagttgcctttgctgcttggttttaccgttggggtgtagtcacctggcgcatggcgctgtaccacttcaaccacctgatcaaccagctcaggtaacgcctgccccataactttgtaagtaaaaggagtagggaattcaagcagttcgttaagtttggttttcatgtcagctccggcgtaacgtaattaaatagcaactcccgccagaaggcgggagttttttactgatgcttagtatatggggacggaaattacactttcaagtgtttaatttttaaccaaaccagtgatggaacattaatttaatgtaatcaatgattttgccgaagaagttaccttccgggatttcttgcaacacaaccagcgggcgttgctcgatcgttttgccatcaagctggaagttgatagttccgacgacctgattcttttgcagcggcgcatgcaattcactgctgttcagcacatagctggctttcagatctttcatgcgaccacgcggaatggtcaggtacacgtctttatcaacccctaagctagcgcgatcagaatcaccaaaccaaaccggttcagaggcgaactctttacctactttcagtgggttaacggtttcaaagaaacggaagccccaggttagcagttttttactttcggcttcacggcctttaaaagtacgtccgcccattaccgcagaaatcaagcgcatctggccttcagtcgcagaagcaacaaggttgtaacctgctttgtcagtgtgtccggttttgatgccgtcgacattcaggctgttatcccataacaggccgttacggttcagctggcgaataccgttaaacgtaaattctttttctttatagatgctgtattcattcggtacgtcacggatcaatgcctggccgatcagcgccatatctcgcgcggagctgtactgaccatcagcatccagaccatgtaccgtctggaagtgggtatttttcaggcccagtgcgttaacgtagctgttcatcaagccaacaaaagcgtcctggctaccagcggcaaaatcggccatggcgacacaagcatcgttaccgctttgcaggttaataccgcggatcagctgagaaaccggaacctgcatgcccggtttgaggaacatcaggctagaacctttaaacaccgggttaccggtggcccatgcgtcgttgccgatagtgactaaatcagtttctttaaatttaccggctttcattgcctggccgataacgtaactggtcatcattttggtcaggctggcaggatcgcggcggacatctgcgttctgttcggcgagcactttgccggagttatagtcaatcaggatgtaggactccgcatcgatctgcggtacacccgggatcatagttttgatattcaggtcatcggcatgtgcagcagagataaaggctgtgcaaagagccgtggtgagcgccaggcgcttcatgatacgagcggaaaaaatggtattcatggtctgaactacgacatccgtgatggaattaaaaaagtgccctactatagcaaatgcactaccggcaggcatctgactttccgcgtgactttgttaacgtcatttacagaaattgacacatcagatgcctgctttacgttactgcgcggtagtaataaaactctgtaattgggcttcggtttgcaaacgttgctgcaaggtactggcttcggctttgctggcgaatgggccaagctggatccgccagaccgcgccattttgagttacgcgaccggggacgccgaacttctgtcccagttgctgttggtactgttgcgcacgagcctgatcgcttacggccccgacttgcaccataaagttgccgctggcgctttggctgacggcttgcggtgtcaccattgcagggctggttgcaggcgttgtgctcggagctgtaacaacgggctgtggcgcaggcgtcggttcgctgccttccagtacaccaggcgctaaggtcgttggtgcgccgaggaaaccgctactggttaccggcgcgccggtcggatcttcgctttttagcgtgctattactgaccggaagaatgtcaccctgcgggccagacacactacttgttcccgcgccaccgcttaaatcgggaggtgcaggcagggcgtaagtctgtttggcgactgtggtacaagccataccaggaccagaaaggctaccatcctgggcaacaataatcggatcgatacgaactttggtgttgttactcgtgttaagacggtcagctgccgcgcgagaaagactaataacgcggtcgttgccgtaagggccgcgatcattaatgcgcaccacgatcattcgcccgttagccaggttagtgattctggcgtagctggggatcggaagcgttggatgggctgccgtcagctgtgtcggatcgaatgcttcgccagaggccgtcaggttactgccgggttcggcatcatagattgccgccagtcccgcctggctaaatcgagacggatcctgcacgattttgtagcttttaccgtcgcgctggtaatcctgatttgccgtcgcgttcagtggttcgaaacgcgggtccgccccgctaatttcaactatagggccgttacataccgcaggctgcggtacacttaccgtctgttgctgaccatcatcgcttgtacatgccgcgagcattcctgccgcgatgcagatcccgagccactgcttacgcattgcgcacctcttacacgcttttgctcaacattttcctgtgggtgtggatactcattacaatcccgaacccagccatcagcacaattagcgcgcttcctccataactgaccagtgggagcggaacccctacaaccggcagaataccgcttaccataccaatatttacgaagacataaacgaataatatcagcattaagccgccagccatgacgcgaccaaaggtggtttgcgctctggcggctatccacagcccgcgcatgatcagcagaatgtagagagcgagcagaatcagaatgcccactaatcccagctcttccgccagtaccgcgaagataaagtcagtatggcgttcggggagaaattcaagctgactctgagtgccgtgcagccagcctttgccgcgtaatccgccggagccaatagcaattttagactgaataatgtgatagcccgcgccgagtgggtcactttccgggtccaggagcatcattacgcgctggcgctggtaatcatgcatcaggaagaaccacagaatcggaatgaacgccgctaccagcactactgcgacgccaatcagacgccagctaaggccagagaggaacagtacaaacagaccggaaagcgcaacgaggatacttgttcccaggtcaggctgtgcagccaccagcagcgtgggcataaatatcagcaccagcgcgatgccagtgttcttcaagcttggcgggcaaacgtcgcggttgataaagcgcgcaaccatcagtggtacggctattttggcaatttcgctcggctgaaaacgaacaataccgaggtccagccagcgttgagcacctttagagatggcaccgaaagcatctaccgccaccagcaaaataatacagatgatatagagatagggggcccagccttcataaacgcgtggaggaatttgcgccatcaccaccatgatgaccagacccatcgcgatttggccgattttacgctccatcatgccaatatcctgaccgctggcgctccagataaccagggcgctgtaaaccagcaatgccagtaagatcagcagcattgtgggatcgagatggactttatcccagaatgtttttttattcggattatccgtcatgattaatggtcctccgctgcggcaaccgctggattttccgcaggcagatcggtgttgttatcacccagcataatgtggtcgaggatctggcgcatcagtgtaccaaccgccggacccgcaccaccgttctccagaatcatggcgacagccacttgcggattgttgtatggcgcaaaggcggtcatcagtttgtggtcacgtaaacgctcggcaattttgtgcgcattataggtttcgttcgctttcagaccgaagacctgagcggtaccggatttcgccgcaattttgtacggtgcgctagcaaagtatttatgcgccgtaccgttagggcggttagcaacaccgtacataccgtctttcgccagctcccagtaaccggaatgaatatcgccgacgggcggttcatgcggctgtacccatggcacctgtttgccgtcttcggcggtgctcatcagcaaatgaggaaccttcacgataccgtcattaatcaggatcatcagtgccttactcatctggattggggtcgctgtccagtaaccctgaccgataccaaccggaatggtgtcaccctgataccacggttttttaaagcgtttctgtttccattcgcgggtaggcatgttgccggaacgttcttccgccaggtcgataccggtgtaatgaccataaccgaatttacccatccattcggagaggcgatcgatccccatatcgtaggccacctgatagaagaaggtatccgcagattcttccaggcttcttgtgacattcagacgcccgtggccccattttttccagtcacgataacgtttttcgctacctggcagttgccaccagcctgggtcaaacagcgtcgtattgcgcgtgatcaccccggcgctcaatgcgctaaccgccacatagggtttaactgtagacgcgggaggataaaccccctgtgtggcgcggttcaccagcggtgtattcggatcgttcaacaaggcggaataatctttgctggagataccgtcaacaaacaagtttgggtcataactaggcgtggaaaccagcgccagcaccccacctgtacgcggatcggtgactaccacagctgcgcggctacccgccagcagcgtttcaatatattgctggagtttgagatccagcgtcaggtaaatatcgtgtccggcttgcggtggtacttcttttaactggcgaataacacgcccacggttgttaacttcaacctcttcataaccggtctgaccgtgcagcacatcttcatagtaacgctcaatgcccagcttaccgatatcatgcgttgccgcatagttggccagtttgccgtcattattcaggcgttcgacgtctttatcgttgattttgctcacatagccgatgacgtgggtcaacgcgctaccgtaaggatagtaacgacgtttatagcctttaacttcgacacccggaaaacggtactgattgacggcaaagcgagctacttgtacttcggtcaggttagttttcaccggaatagaggtgaaacggtgactacgtgcgcgctcttttcggaatgcagcaatatcgtcatcggtcagatctaccacgctgcgcaaagcgtccagcgtttgctgcacgttatcgactttctccggcatcatttctatctggtagatagtgcggttgagggccagagggataccgttacgatcgtagataatgccgcggctgggcgcgataggcaccagcttaatgcggttttcattagagcgggtctggtagtcggtaaagcgaacaatttgcagattatacaggttggcgataagcacgccggtcagcagcaaaatccccaaaaaggcgaccagcgcccggcgcacaaacagcgcggactctgccgtatagtcgcgaaaagagttctgtagtttcatccgctgcgttttctactcaaagctcccttatcactcacggtgataaggatggttggtggtgatgctccacgcccggtacagactctctgcgaccagcacgcgaaccagcggatgggggagggtaagcgcgctcaggctccagctctgctcagccgccgctttacaggcagggctcaacccttcaggcccgccaatcagtagactgacgtcgcgaccatccagcttccagcgttccagctcagcggctaactgcggcgtatcccagggcttgcctggaatatcgagggtgacaatgcggtttttgcctgcggccgccaacatctgctcaccctctttgtcgagtatgcgcttgatgtccgcattcttgccgcgttttccggccggaatttcaatcagctcgaagggcatatctttcggaaaacgacgcaggtactcggtaaaaccggtttgtacccagtccggcattttcgttcccacggcgacaagttgcagcttcacgcattaactccagagtttttccagttcatacaggcgacggctctcttcctgcatgacatggacaatcacatcgcccaaatccacgacaatccagtcggcgctgttttcaccttctacgccgagcggtaacaggcccgctgcgcgagactcctgcacaacgtggtcagcaatggacataacatgacggctggacgtacccgtacagatgatcatgcagtcggtgatgctggatttgccctgaacgtctaaggcgatgatgtcctgacctttgaggtcatcaattttgtcgataacaaaatcctggagtgctttaccctgcaagttttccccctgggtgaatcaaatagataaaaatggtctgtcagtatacctgaaccagaggcgatttcgggacaattgtcgccgaatcggctttcgaaagtgggctatcatcccaccccgcgccgcagattgcatcgccatttttgtaaaacaatttctacaaagtcgtgtctggcggaaaaagtctggctgcggagaatatcagcctgcccgggtctgtcaatggtcgttgcggcttacccgtaaaaaaacagaaaagtcatgcattctcgaccccgatggcacggctattgaggacgcgtagcgtcgcgaatttttggttgatatcaatggcgctccaacacccctggtcaacgcgaaaatgccacatagcttcggcaggcatgccaattaaacgggcgattaacagactcagtacaccctgatggctgacgactaaaatattctgatagtgctgaaattcactaagccttgcgataaagcgttccacacgttggctaaatgcctgaaatccttcaccgttcgtggggattgcatgctgccagtcattgcaccacgcgctatagttttcggcatcttcttgcatgaggtcgcgatgatgtcgcatctcccagtcgccaaaaaacatttcgttgagttcaggtatgatttgcacggggagctggcggtcactgagaaccagtcgcgcggtatgctgtgcccgttccagttcactgcataaaaccagatcaaaggaaacaccatgtagcagcgtatgcagattttgcgcttgctcaataccgcgcgcggtcaggggggtgggcgcatgaccgctgtaaagaccatcgatattcgcttgcgtttcaccatgacgaattaaccacagtcgcatcatgccctccgtaacgacaggtatcagcgatacaagccttgttggttaatgtaagtcagtaccggttccggcaataaatcctcacaactttcaccgttttgcaaacgttcgcggatgatggtcgcgctgatgttaaaccacggcgtttcagccagataaattttaccggcaggctgaaggtgaagatcttccgggttatgtgtcaaatgatcttccagccattgctggtattgcggttgcgccatttcaagtgggtaacctggacgccgacagacgatcaaatgtgcattgtcgagtatcgtttcgtattcgtaccaggtcggaaaggtcagcagactatcctgaccaataataaacgccagcggcacgtccggtccttgttcctgccgccactctttcagtgtttgcgcagtgtaagagggggcattgcgctttagctcgcgttcatcaagagtaaataatggcttgtcggcaatcgccagttcaagcatgtgtttacgctgcacgctgttcgcttccggctggggacgatgcggaggaacattattagggatgattgtgacccgcgtcagaccaatcaaattcgccagcgtttccacgggttttagatgaccatagtgcaccggatcaaaggtgccgccaaacagagcctgtaaagatttcatatcaaccgtcgataaatacgtccgccaggggtttatggcacaacagaagagataacccttccagctctgcccacacactctgaccgtaatcttgtttgagggtgagttccgttcgtgtcaggagttgcacggcctgacgtaactgcgtctgacttaagcgatttaacgcctcgcccatcatgccccggcggttctgccatacccgatgcttatcaaacaacgcacgcagtggcgtatgggcagactggcgtttcaggttaaccagtaacaacagttcacgttgtaatgtgcgcaacaaaataaccggttcgctgccttccagacgcagttgctgaagaatatgcaatgcgcgcttactttttcccatcaacaaagcatcaacccaatgaaaaggggtgaaatgcgcggcatcattcaccgcctgttcaacgcgcggtaatgtcaatttgccgtctggccagagcaggcttaaacgctccagtgcctgagccagcgccagcaggttaccttcataacagtagcagagcacctgatttgccgcgtcatccagttctaagttgagctgttttgcgcgcgcagcaacccagcggggaagctgagcctgctccggtgtctgacaggtcacctgcacgctgcgattcgcaagcgcagtaaaccaggcggcattttcttgcgctttgcttaatttattaccgcggacgatcaacagcaggtcgtcatgcagaagtccggtgagtgtgagaagttgctcattgatcgccgcattcggtccgttttctggtaacaacagcaatagcgtttgtcgactggcaaacagactcatagcctggcataagctaaagatcgcattccagtcagtgttgggatcaatggaaaaagtgtggtgttcttcgaatccttgtgccgcagctacctgacgaacagcgtcctggctttcctgcaataacagaggatcgttaccaagtaaaagatacgccgcgcgcagcccttcattgagctgcgcgcggagttgttccgggtacaaccgaatcatcagttacccagcgtggtggagacgcgtgcaggcgttgccggagtatccgttgtggtgctcgtctgttcttcgtcggaacgaatatccgcagcacggatgcttggcagcttacgaatcagctgttcggcagcacggtcgtacatctcttttacgatcatgtcttgttcgttatctttcgctaacgccatttgcgggttatcgaagaagctacggaagactttggcgctaatcgggtagatatcacggccggggatcaacacggtcgcattaaccgtcatgatcatctgatactctgctgtttgaccgttacggaatacgcttgcggtatctttcgcgatgctcactttacccaaacgcaaggatggaacgtccttacgcgtggtttctttatcaagcaactcgacaccattcagacgtaactggttacgcaccgcacggcttaatggcccgttcggatcgccactgtccaggatcatgaccttcatagtggaaggaacctgcgtggtatcacgcagatgccagccacacccggcggtgattaacaccgccagagataacaacaatgttgccagatatcgcacgcttcctcccgcgcttagccaacgaccagattgaggagtttacctggtacgtaaatcactttacgtacagtaacgccatcaagatattttgctaccagatgttcctggccagcacgttcgcgaacctgttcttccgttgcgtccaccggaacggtgattttggcacggactttaccgttaacctgcaccacgaccagcgtggagtcttccaccatcgctttttcgtcagcaaccggccacggcgcgttgtcgatatcgccttcgcctttcagttcctgccacagcgtgaagcagatgtgcggggtgaacgggttaagcatacggacaacggccagcagtgcttcctgcatcagagcgcgatcctgctcgccatcggttggtgctttcgccagtttgttcatcagctccataatcgccgcaattgcggtgttgaaggtctgacgacggccgatatcatcggtcactttagcgatcgttttatgcacatcgcgacgcagcgctttctgattttcagtcagcgcatcaacgttcagtgccgcaacatcaccttttgctgtgtgctcgtaaaccagtttccagacacgtttcaggaagcggttagccccttccacaccggattcctgccattcgagagtcatatcagccggagaagcaaacatcataaacagacgaacggtgtccgcgccgtaacgttcaaccatcacctgcgggtcgataccgttgttcttgctcttggacattttgctcatgccggtataaaccagttcatggcctgccgcatctttcgctttcacgatacggcctttctcgtcacgttcaacgatagcatcaaccggggaaacccagttacgttcgccgttttcgccaacatagtagaaggcatctgccagcaccataccctgacacagcaactgtttcgctggttcgtcagagttcaccatgcctgcatcacgcatcagtttgtggaagaagcggaagtagagcaggtgcataatggcgtgttcaataccaccaatgtagatatccaccggcagccagtagttagccgcttcggaatccagcataccttctttgtactgcgggcaagtgtagcgcgcatagtaccaggaggactccataaaggtgtcgaaagtgtcggtttcacgcagtgctggcataccgttaacggtagttttcgcccactccggatctgctttaatcgggctggtaatgccgtccattaccacatcttccggcaggatcaccggcagctggtcgtccggggtcggcattacggtaccgtcttccagcgtcaccatcggaatcggcgcgccccagtaacgctgacgggaaacaccccagtcgcgcaggcggtagttcactttacgctcgccaacgcccatcgcagtcagtttatcggcgatggcgttgaaggccgcttcatggtcaagaccgttgaactcgccagagttgaacagcacgcctttttcagtcagggcttgctgagaaagatctggctcagagccgtcagctgccaggataaccggtttgatgttcaggccgtatttagaggcaaactcgtagtcgcgctggtcgtgccccggtaccgccataactgcgcccgtgccgtactccatcaatacgaagtttgctgcccaaacgggaatttcttcgcccgttaatgggtgaaccgctttaaagccagtatcgacgccttttttctccatcgtcgccatttcagcttcggcaactttggtgttacggcattcgtcaataaaggccgccagttcaggattattttccgccgctttctgcgccagcggatgacccgcagctaccgccaggtaggtacaacccataaaggtgtccgggcgggtagtgtaaacggtcagcgtgttgtcatagtcgttaacgttgaaggtgatctccacgccttcggaacgaccgatccagttacgctgcatggttttaacggtgtctggccagtgatccagtttatccagatcgttgagcagctcgtcagcgtaagcagtgattttgataaaccactgcgggatctctttacgttcaactttggtatcgcagcgccagcagcagccgtcgataacttgttcgttcgccagtacggtctggtcgttcgggcaccagttgaccgcagaagtcttcttatataccaggccttttttatacagctcggtgaagaatttctgttcccaacggtagtattccggcgtacaggttgccagctcgcggctccagtcataaccaaagcccagcattttgagctggtttttcatatacgcgatgttgtcgtacgtccacggtgccggagcggtgttgtttttcaccgccgcgccttccgcaggcagaccaaacgcgtcccagccgatcggctgcaggacgtttttgcccagcatacgctggtagcgggcgatcacgtcaccgatggtgtagttacgtacgtggcccatgtgtagtcgaccagaaggatagggaagcatagacaggcagtaatacttctctttgctctcgtcttcggttacttcaaatgtgcgcttctcatcccaatgaagctgtactttggattctatctcttccgggcggtattgctcttgcatggcagccagtggtcctgttttcaatacggctacaaatgtagcgttgaggtggtttttcagatccgcatagcatagcccaaacgtccgcgtcaaaacagcctttcgcgcactcgacgttgaaatgatgcccggattattcatacattaatttacagagtttgtgggcgtattagcaaagcaaggaacaaagaacgtctattattatagtcagttaacgacccgggagatgaaacgatgaacaaggttgctcaatattaccgtgaactggttgcgagtctgagcgaacgcctgcgcaatggcgaacgtgatatcgacgcactggtggaacaggcgcgcgagcgcgtaataaaaacaggggagttaacgcgaaccgaggtcgatgagctgacgcgagctgtcagacgtgacctggaagagttcgccatgagctatgaagagagcctgaaagaagaatctgacagcgtctttatgcgggtgattaaagaaagcttgtggcaggagctggcagacatcaccgataaaacgcagcttgaatggcgcgaagttttccaggacctcaatcatcatggggtttatcacagcggagaagtggtcgggctgggaaatctggtctgcgagaaatgtcacttccatctcccgatctacacaccggaagtgctgacgctatgcccgaaatgtggtcatgaccagttccagagacgcccgtttgagccgtaatagtctgatttcgcacagcaataaagagaatatgggccgaatgaaattccccggcccttgtttttatctttacagtaaatcttcagtctcacgaatttcctgactgacatctctggttccggaactctgaactttacgatacaggtcgagagcctgtcggagatcgacaggtcttccttctccgtagtgatacataatggccaggttataccaggcagtggcgtcattgcattcagcggctttcgtaaaccattcaaaggcagcctgataatctttctcaacgccttgtccgtgtttatacatataaccgatgttgacgtaagcgccgacgctcccctgagcggcagccttcagataccagtacatcgcttgcttatagtcctggtccaccccttcgccagcgttataatcccatgcaatttgaaactgggcgtgccgattaccctgctgtgcgcttttcaaataccagaatgcggcgagtgtcttgttttgagcaacgccttttccgtcttcataaagatcggccagattgttttgcgcgtcactatggccttgtaatgcagcttgtttgtaccagaaaaatgccagcgcatagtcttttgcgactccgttgccatttctgtacatccacccaagattattttgcgcataagacattccgctctccgcggctatctgataccagacaaccgcttctttataattgggggcttctccacgatccagtgtccagccaagggcgttggaagcgaaagtatggccttgtagggcagcttttttcagccagaagatggcttgctcattatctttatgacggcttttatcctcggtatacttttgccctaaggaatactgtgcttcacaatgaccttgctcagcggccagcttcagccagtaaaaggctttttcgtcgtccggagaatcaattgcgctatcgcgattataataaaacccaacaatatattgagcctcgcaatcgcctttttcagcacgttcgataatctcatctatacttaaattatcgcagcaactactcgtgaaaatcattatcatttccttatggttgcagataaaacatattatatttttatgtgttccatttttgcgtaagccttattttatgcgtattatgtcgcgtcagaaaagtataaataaacgagcctcgcaatgcggctaatattcatttaatgaatatttaaggataaattatatggacatggagagccaaaaaatattgtttgcactttccactccgatggaaatacgcaatgaatgctgtttacctagccatagtagtcccaaaatgtatttaggtacatgcttttttgacctttcttccagttggggaattgatgaccgtgatgacctgctgcgcacaattcaccgaatgatcgataacggtcatgccgctcggttggcagggttttatcaccgctggtttcgttatagcccatgtgaatggcgtgactatcttgctgaactaaatgagcaaggtcaggcttatgcgcaatttgtcgccagcaccgccgaatgctgtggcgaagggggaatcaaagcctgggattatgtccggatgggttttttaagccgaatgggcgtacttaataactggttgagcgaagaagaaagtctatggatccagagccgcattcatctacgggctctacgttattatagtaactggcggcaatactttgccggttatacctttggtcggcaatattggcagtctcccgaagatgatcatctgcctttattacgcgaattcttagcgcgtaaagaatacgacgattccggcaatgatatgttttatcaattatttgccagtgatgatgcgtattaccctaccttgtcctggcaaccattggcttactattctgcatgcccggaaacgcttaaggatatgagcgacctatgaaaaattgctggaagatcctcgatatagaggaaacgactgacgtcgatattatccgccgcgcttatctggcgctgttaccgtcctttcatccagaaaccgatccgcagggttttaaacaacttcgtcaggcgtatgaggaggcgctacggattgcgcagagccctgctaaatctgtttggcaaccagaagaatatgaggtagcagaacatgaaattctgctcgcctttcgtgcgttacttgcctctgatagtgaacgttttctgccctccgcctggcagcgattcattcagcaattaaattattgcagcatggaggagattgatgaattacgctggagcctgtgcacaatcgccatgaacactgcccatttatccttcgagtgcgtggtgttattagcagaaagattgcggtggttacaggaggaaaataccggggaaatagacgaagaagaactggaatcctttttatatgccattgcgaaggggaatgtttttaacttccagaccattctgcatctgcccgttgccgtgcaaaatgacaccatcgatttttaccaaatgttcgctcggatttggagtagccatccacaatggctgacattgtatttagcgcaacatcgcgcagtgattatccccgatgatgcaaaactgcacagaaatttactccgctggtatagcgcaggtcgcctggatatccccgaacttctggattacgcccagagttggcgggaaactgaacctgataatgaagatgcgccttattatgaatacgcgcaacgcgtctattgtggagaaggcgaaagcctgttggcagaactttgtgactactggcgcgagtatccctccacccaggcggatgctttaatgttgcaatggtgccgtcagcatcgggtcgattattacccattactggtgatgatgattgaagcgcgtgatctggttaacgatcagggaaaaccgctactttatgtccccggcgacagcgcccgtacgcgttttcatttatacgaaatactcagcgatgaaaaactctctgcgctggggcgtagtctggtcgagatggttttgcacaaaggacgtaagccgcggatcagtctcacgcgtgatacagaacataccttatggccattatatctagttgccaaacaattagtgcaggcctgccaacctacagaagaaagtttaatgccgattgtgagccgccttgatgcagaaaatcgttgtccactggaagcattaattattcgtcgattattaattcaggcggcgaattttaccgagaagcaaactgttgaaccggagccgcaaccgcagccaatgcccgttgacgatggtgggccaggctgtctgggcatcattaaaattattttctatatttttatctttgctggtttgatagggaaaatactccatctgttcgggtgacagtcgacgttaatgtgcgggaagcccggcaagtaatctttccgcatttttgtaatgttgtttggcggtcagttttaaccatttttgagattcataatggttaacattaataccactgccatttctgtagatcaaacctaaagtatattgagcatgagcatacccttgttcagctgcttccttataccagagaattgctttacgggtgtcgggtttgacccccagacctttgaggtagatccaccccagtttactttgcgcgcgtggattttcctgttccgcactttgctcataccagtatctcgcctgtgtataatccagtggtttaccgtcgctaccatgaagataaaattctccaaggcgatattggctcgtactgtgaccatgaatcgcggaaagctccgtggctgccgtggtgaatggaagactgcccggactgcttaaataatcaaaggcataattcaccatggctttatcacgcaacgtcgttttcttgggttggctaatacaggtaattgctgcaactataaaaattgcgaatatatacattaattttttattcatgtgtgaatgcttcgattttctttttattttgaaagcgtcaagtttatactcatcaataataaaaaagtagtcagttaatgcacttaagggattattaacaaatgaataaggaagaacaatatcttctttttgcgctttctgcgcccatggaaatacttaatcagggttgcaaacccgcgcatgacagcccaaaaatgtatactgggataaaagaattcgagctcagtagttcctggggaataaataatcgtgatgatttaattcagactatttatcagatgactgatgatggtcatgccaatgatttagctggcttatatctgacatggcatcgctcttcccctgaagagtggaaagcattaattgctggtggcagcgagagagggttgatttatacccaattcgttgcccaaaccgctatgtgctgtggggaagggggaatcaaagcctgggattatgttcgaatggggtttctgagtcgggtcggtgtgctcaacaagtggctgacggaagaagagagtttatggctgcaaagccgcgtctatgtacgagctcaccattactatcacagctggatgcactatttttccgcctatagcttaggacgtctctactggcaatcttctcagtgcgaagacaacactagcctacgcgaggcgctaaccctgtacaaatacgatagcgccgggagtcgtatgttcgaagagctggcagcgggaagcgatcgtttctatgccacgcttccctggcagccattaactgtccagtctgaatgcccggtaacgcttaaggatgtgagcgacctatgaaaacatgttggcaaatcctcgaaattgaaagcacgacgcaaatagacattatccgccaggcttatcttgctcgcttaccgttgtgtcatcccgaaaccgatccgcaagggtttaaagcattacgccaggcctatgaagaggccctgcgactggcggtaaatcctgtcgaggaagcagatgatgaagaaaaagatgctgccgctgaacatgaaatactacgtgcattcaggacattactggatagtgaaagtgatcgttttcagccttccgcctggcagaaatttattcagcaattaaatacctggaacatggaggatgtcgatcaattacgctggccgctgtgtgcaatcgccatagaagcgcgatatcttagtttaaattgtgcttctttgctggcagagcgtttgaactggcatagttttaatgacagcgaaggaatggatgaggaagaaagggaggcttttcttgaggccattcaggctggtgattgtttcgatttccttagccttctggaatatcccattgcgttgcagaaccagactgttgagtattacttcgcgctggaacgttgctgccgttaccatcctgactatgtcactgcgtttttggcgatggaaggtccgtggttaattcctgatgatgcaaagttacatcgcaaactgttgcgctggtacagcagcgtgcaaacaggtatggcggaactcattcctgtcgctcaacagtggcaaacggaagaaccagaaagcgaagatgcccggtattacttgtgtgcacaacgtttgtactgcggcgagggggaaagcctgcttgccgatctctgcgcgtactgggaaagttacccatctacacaagctgataatttgttgttgcagtggagcaagcgtcattgcccggattatttcgcgttattagtgatggttatcgaagcgcggagcatggtagatgcgcaaggtcaaccgctgaaatatgttcctggtgagagcgcccggacgcggctgttatgggcggagattttacatagcggaaaattaagcccgttaggtcaaagctttattgagagcttattcttcaagcgcaaagcatgggcgtggtggaaaagcagagtcggtagcgagacagagcaagatagtccgttcctggatttgtatcgggtagcggaacaggtagtacttgaagcgtttccgaaacaagagatgctggcccgtcttaatacaaggctggaaggcggagatgctcatccattagaggccattgtcacccggatgcttttgacgaaagtgaaactcgagccggaggatgaagatgtcgatgagccaacacctgaaaatcatgaagaaaaaaatgatgagggtgaaaaaccacagagcattaccagcattatcaaaatcagtttaacggtgctggtgataggttatgctctcggcaaaatcgcgatgttgtttagctgacgatgtgttttttgcgccgatgccggatgcagcgtttacgccgcatccggcagccgtgtttatgggatctcaatggctaaataatcgctcgcccgccgccgaacttcatccacgcgggccatatcgttactctgcaacgccgcatcaaaatcggtgatcacccggccgatctcttctcgctcgtcacccagcgcccgcgcccacaactcttccagtttggctttaaaggtgcgattgatgagcatatcgcgcggataaattttcaatgcggataaccgcgtccgactctcttcaatctgctgcgcgctcaatgttaccgggctgtggttaatcactctggacttaacgctgccgtcttccagaagcacgtcaacttcaagcaacccgttgatatcataactaaagcgaatatcaatgctctgataagccccggttttcttcaacggcacatcgaaggattccaccagaatgttgtttttaactttgtggttttctccctgatagacgttaaccgtaatactatcctgttccgggtgcatggtactataagtttctacacggctcacgggcacagtggtgtttcgttcaataatcgggctgaaaatgccggaaacgccctggcggttaacttcaacgcccaagctgtaagggcaaatatcagtgaggattacctcttcaatatcttcactgcgtaagcggcaggcggcctggattgctgcgcccagcgcgacaatggtgctcggatcgtaactttgatacggtaatttgccaaacagacgcacggcgattcgctgcaccagcggcatttgactcgcgccgccaaccagcaccagactgtcgatttgactcggcttcagacgcgcatcgcgcaacgcctgttcaatcggcactcgcaagcgattgagcagcggcaaccacaaatcttccagttcgttctcgtaaaattcgcattcccgcgtttcttcctgatactgccagcgaatgtgcaatgggctttgattgctacattttgccgcttccacacaggcgtacaaggctgccagttcactctcgttaagcgtggtcctggcgacatccgcgcgttttaaaacctcatcgaccagcatatgggtaaaatcttcgccaccaagaaagttgtcgccagcggaggcgtgaacttcaatcaccggcgtggcgtactcaagcaccgtaacgtcaaacgtgccgccaccgagatcaaacaccaggctacgggtattttgttgggtatgcaggccatacgccatcgcagctgctgtgggttcattaattaagcgtaccgcatttaacccggctaactccgctgctaaacgggtatgcttgcgttgttcatcgctgaaataagccggaacggagatcaccacatctttaatcggacgttgcagaaattcttcggcatcttcttttaaactgcgtaataccaaagaggacagttctggcgcgttaaatgtgtcgctgcctaaccgccagttggtattactgcccattgcacgtttaaataacgctgccgttttatccggatggctagtacgccgacttacagccggttttccgactaaaatatgattattttcatccatgctaattatggatggtgttaaatattcaccgaacttatttggaattaattgcgcggcaccgtctttccagacggcaattaaactattggtagtaccgagatcgataccaatggcgagttctgcattatccattgcatttatatcttgaaagaaaaagagataaacagattaagaccacccaggtaacgcgtggtgatcttaatcaatgacgtgtgttaagcgtaaaatttcagacgatcagccagtaaatcaacaaagccctgacgatcaacatcgaccattacggtggcattcggtttattgcctgtcagataataataatcaacaaccgtcataccctgggtatatttcccctgtgtttccacgccaacccagcgctcaacagaggtaaataactccggtttcaacagccaggcgatggtgcatgggtcatgcagtggtgcgccgacaaagccccatttttcgtctttatgatattcgaggaagaaatccagcagttcggcaacaatggtactaacagggttaccaatcgcgcggaaacgctcggtgtcttcaacgtggatttgtgctttatgagtaacatccagaccggccatcaccaccgggatcccactctggaagacaatttctgccgcttccgggtcaacgtaaatattaaattcagccgcaggcgtccagttacccagccccatagcgccacccataatcacgatacgggcaattttgctatgcagttccggatggctattgagcagcaaggcaacgttagtttgcggtccggtagacacaatggtgacaggttccgcactttcacgcagcgttttcgccatcagctctaccgccgtacagttttgcggtgcgaatgtcggttccggtaatgccgggccgtcgagaccgctttcgccgtgcacattgtccgcgataatcaactcacgcattaacggttttaccgcgccgcctgctaccggaatatcggtgcgattaagcaaggtcagcatacgcagaacattgcgtaaggttttttctggtgtctggtttccggcggaagacgtaattgctttgacatcaagctctggactggcgagggcgagaactattgcgatagcgtcgtcatgacctgggtcgcaatctaacagaattggcagtgccattgttgctccttgttgtgtgcttctttgcgacaagggtaacgccaggatgtaacagatacgaggggcgaaacgataaagcgtgagatggcgcgcaattgggtatgcgcgccagagtgattaatgcaggattttcgcgaggaagtcttttgcgcggtcgcttttcggatcatcgaagaaagcgtctttcgggctgtcttcgacaattttaccctcgtccataaagatcacccgattcgccactttacgggcaaagcccatttcgtgggtcaccaccatcatggtcattccttcgttcgccagttccaccatcacgtccagtacttcgttgatcatctccggatccagcgcgcttgtcggttcgtcaaacagcatcgcaataggatccatacacaacgcgcgagcgattgccacacgctgctgctgaccgccggaaagctgcgccggaaacttattggcgtgagcagaaagcccgacacgctccagcagtttcagggctttttcacgagccggcgctttatcgcgtttaagcactttcacctgcgccagggtcaggttttcgataatgctcagatgagggaacagctcgaaatgctggaataccatcccgacgcgggaacgcagctttgccagatcggttttcttgtcgttaaccacgataccatcgacggtgatttcaccttgctgcaccggttcgaggccgttgacggttttaatcagcgtacttttgccggaaccagacgggccgcaaaccaccaccacttcgccttttttcacttcggtactgcagtcggtcagcacctgaaagtgaccataccatttactaacatttttcagggtaatcattatgctgtccttcttttcaagtagctgaccaacaagctcgcgctaagactaataacgaaataaacaaatccggcaaacaggatcatctcaacctgcgtaccatcacgctcaccaatggtactggcggtacggaagaaatcggccagggataacacatacaccagactggtatcctggaacagtacgatgccctgagtgagcagcagcggcaccatcgcgcggaacgcctgcggcagaataatcagtttcatgctctgccagtgagtcattcccaacgccagcgcggcgctgctttgaccacgagaaatactttgaataccagcacggataatctcactatagtaggccgcttcaaacatgctaaacgccaccatcgcgctaattaaacggatatcattttttgggcttaatcccagcacgttttgcagaaaacccggcacgatcaggtaaaaccacagcaaaaccataactaaaggaatgctgcggaatacgttaacgtaggctttggcaaaccacgccacgggcgcaaagctggataaacgcatcaccgccagcatcgtgccccacaaaataccaatcactaccgccgtgacggtgattttcagggtgatcaccagcccgtcgagcagatatggcagggaagggacaatggaactccagtcaaactcgtacattatttgccccccatgttgccaggcaggcgaactttacgttcaaccagcgtcatcaccagcatgataaaagcgttaatcaacacatacgccagcgtaatggcggtaaagctctcccaggcatgggcactgtaatcgagcaatttacccgcctgcgccgccatatccaccagaccgatagtgctggcgatggcggagtttttcaccaggttcatcatctcactggtcatcggcgggacgataacgcgataagcattaggcagcagtacgtatcgataagcctgcggtagcgtcaggcccatcgccagcgcggcatttttttgccctcgcggcaggctctgaatcgcggcgcgtacctgttcgcaaacacgggcggcggtaaacagccccaggcagagcatggaactaaggaaaaactgaatattgggatccagctcggccttaaaccacatgccgattttctccggcagcagctccgggatcaccagataccaggtaaagaattgcacaatcaacggcacgttgcggaacagttcgacatacaacgtacccagaccagagagaaaacggtttggaacggtacgtaaaatgccgaaaaaactaccgacgaggaaagcgataatccaggcgcagatgctcaaagcgatcgtcacctgaaaaccactccagatccaaccaagataggtggtgttgccgaacggggcttgttgtaaaaaaataccccagttccagtctatagacataaatctactccagaaaaaagagggtagcagcgttaactgctaccctcgaagattgttacccagcgtattgcggttttcaggcccgatggggaacgaccatcaggcgtatagtctgtccgtgctacgtaacaatcgagagggctggaatttccgcccctggttcttgtaattagttcagtgccttgtcattcggttctttgaacagtgctttcatttcgtcactcagttcgaaattcatgttcaggtttttcggcggaattggatttttgaaccacttatcaaaccatttttccgcttcaccggaggtctgcacctgagcgatggtgtcatccatcagctttttgaactgcggatcatctttacgcaacatacaaccgtaggcctcctgagactgcggcttgccgacgatttcccagttgtctggtttcttcgctttcgcacgttcaccggccagcagagcgtcatccatcataaaggcaacggcacgaccgctttccagggtgcggaaagagtcaccgtgatctttggcgctgatgatgcgcatattcattttttgctcttcattcagtttgttgagcaaaacttcagaggtagtgccggaagtgacgactacggctttgtctttcaggttggcaaaatctttgatatcgccaccctttttggtcaacaggcgcgtaccgaccacgaaaatagtgtcagagaaagccgcctgtttttggcgttcgacgttgttggtggtagaaccacattcaaaatcgaaagtgccgttttgcagcagtggaatacggttttgactggtaatcggaatcagttttacctgcaagtccggtttgttgagtttctttttcactgcttcaacaatggcgttggagtaatcctggctgtaacccaccactttttgctgattgtcgtaataagagaaaggcacactagattcacggtgaccgacgacaatcacaccgtttttggcgattttgtccagagtactgcccgctgccggggcggcgtcatctgcctgtgccagtcctgcggaaagcgccagggcgaggattgctgtggcaggtttacgtaattgcatatccaactcctttatcttctgcgttaagaacgcatggatacccgttgtgagtgtttgtgttgttatcgtctgcaactttattgtgcagtgttgtgcctgttagggaaggtgccttaggtaacatttagtttggctaaatgtaaagatattgctgttttattgtttgtttttgcgagatgcgccgcaccattccgaagcaaaattcttaaaatgcactcttttagtgctaccgctggattactgtggtgcaactaggttgtactgatgctgtttcagggtttgccttgtataacaaagcaatagatgtgccaaagttggataggagaatattgttatccggataatgcactgatgccgcatccggtgagcgtgccgaaatatgggatgtattccggcacgataagaagggattatttacgtcgctgacgcagactcatcaacacagcagcaaaaccaaacaatgccgtcagcacccacagcggccagttgccggtacgtgcgtatggtgtgagtccggtggtcggcgtcacgttagtggttaacacctcgcgggtgaactgcgggatcatcgcctgaatctcaccctgcgggccaatcaccgccgtaatgccgttgttggtgctgcgcaacagtgggcgcgccagctccagcgcacgcattcgcgccatctggaagtgttgccatggaccaatagatttaccaaaccacgcatcgttggagatagtcagcagatagtcggtatccgggcggaagttatcgcgcacttgctcgccgagaatgatctcgtagcaaatagccgcagtaagctcaataccatttgcgctcagcggcggctggatatatggcccacggctgaagctgctcatcggcagatcaaagaacggtgctaacggacgcagaatgctctccagcgggacaaactcgccaaacggcaccagatggtttttgttatagcgatcggcactttcgtagctgtacggcgcacctttacccagcgtgatgatggtgttgtaggtatcgtagcggttctgcttattgagacgcgcgtcgacaatcccggttaccaggctgctacctttatcacgcaactcaccgtccagtgctttgaggaacggttgctgattaatttccagatcggttatcgcgctctccggccagataatcaagctacttttgcccatcagcggtgccgttgcgttgtagtaaatcttcagcgtattaagaagctggccttcgtcccatttcaggctttgcggaatatcgccctgaaccatgctaacctgaatggttttctccggttgtggggtaaaccactggatgtaacgcagcgggaagggaagggcaaacagcacgacggccaccaccagcggacgccagttgcgtttgaccaacgccagtgccagcaggccactaaccatcatcagcaggaagttaatggcttccacgcccattatcggtgccagcccttttaacgggccatcaatctggctatagccgaactgtaaccacgggaagccggtcagtacccaaccgcgcagaaactcggtcacttgccagagggcaggggcggcaatcgctacgcgcagccaggtggttttcggccacagacggctcagcacgccagcaaacagtccggtatacaggctcaaatacgccgccagcagcaccaccaggaagatgttaaccgggccaggcattccgccaaaggtcgcgatgctgacatagacccagttaataccgctgccaaagaggccaaatccccagcaaaagccaatagcggcagactggagtggacggcggttaaaggtcaacgcctgaagccccatcaggctaataatcgccgcaggccagacgtcgtaaggagagaaggccagcgttccgcaggcaccgaataataacgccagcagcaggcgaatgcgctggcgttcaattaaactggcaaaagccatgtagttatctatccagtttcggttttattcatccagcttcggctggggactgtcatccgggattttgacatgaacctgaataatacgccgactgtcggccatcgccactttgaactggtaaccgtcgatgtcgatagtttcgccacgcgccggaagatgcccaaatgcctgcatcaccagaccaccgatagtgtcgacttcttcatcgctaaagtgggtgccgaacgcttcgttgaagtcttcaatggaagccagtgcgcgtacggtccaggtatgacgactcagctgacggaagtcgatatcatcttcttcgtcatactcgtcttcaatctcaccaacaatcagttccaggatgtcttcaatggtcaccagaccggaaaccccaccgaattcgtcaataacgatcgccatgtggtaacgctgagagcgaaactctttcagcatccggtctacgcgcttactttcaggaacgacaaccgcctgacgtaacactttgtccatgctgaaggcttcagcatcgctgcgcataaacggcagcaagtctttcgccatcagaatcccttcaatgtgatctttgtcttcgctaatcaccgggaaacgactgtgggcggactcgatgatgacatcaagacattcgtccagcgtctggttgcgtttcagggtaatcatctgggagcgggggatcatgatgtcgcgaacgcgttggtctgcgatgtccatcaccccttcgagcatatcgcgcgtatcttcgtcgataaggtcgttctgcccggaatcacggatcagcgccagcagttcgtcacggtttttcggttcaccgtggaaaagttggctgagtaacagggagaaaaatcccttcttgttgcttatcgtgtcactactgtgactattgtcgtcgctcatggcgtcgtatgggttctcatgttagttaatcaaaacgccgtcgttaatcaccaacggcggggacgtctgccagtcaaatgcctggcaaattattctttctcggcaatgtacggatcctcatagcccagagcaagcataatctctgtttcgagggcttccatttcttctgcttcgtcatcttcgatgtgatcgtaacctaacaaatgcagactgccgtgcaccaccatatgcgcccagtgcgcctccagtggtttgccttgctcctgagcttccttctcaaccacctgacggcagataaccagatcgcccagtaggctcatttccatgccaggcggcacttcaaacgggaaggagagcacgttggtcggcttatccttaccgcgataggtcagattcagactgtggctttcggcggtatcgaccacgcgaatcgtcacttcgctttcttcctgaaactgcgggatcaccgcattcagccatgtctgaaactggctctcttccggtaacccggaattatcttcacatgccagttgtaaatcgaggatcacctgactcatttttgttcctgttcttcgcgcttgcgttctgctgccagcgccgcttttcgtttttgttcggcttcttcccaggcttcataggcgttaacgatacgcgccaccacagggtgacgaaccacgtcttcgctgtggaagaagttaaagctgatctcttcgacatcggccagcacttcgatggcgtgacgtaagccacttttagtattacgcggcaggtcgatctgtgtgacgtcgccggtgataaccgctttactgttaaaaccgatacgggtcaggaacatcttcatctgttcgatggtggtgttctggctctcatcgagaatgataaacgcgtcgttcagcgtacgaccacgcatataggccagcggtgcgacttcaataacgttgcgctcaatcagtttctcgactttctcaaagcccagcatttcaaacagcgcgtcgtacagcgggcgcagatacgggtctactttctggcttaaatcgccaggcaggaagcccagtttctcaccggcttctactgccggacgagtcagcagaatacggcgaatttcctgacgctccagggcatcaactgccgcagccactgccaggtaggttttacccgtacccgccgggccaacgccgaaggtaatgtcatggtcgagaatattggcgatgtactgcgcctggtttggcgtgcgcggcttaattacgccgcgtttggttttgatattgaccgctttgccgtactccggcacgctctccgcgctttgctccagtacccgcgcttctttaatcgcaaggtggatctgttccggttcgatatcctgaatctgaccgcgcatcggggcagtatcgacatacaggctacgcagaatgtctgccgcagcggtgacgcaaatcggacggccggtcagtttaaagtggttatcgcggcgattgatctcgatgccgagacggcgttcgagctgcttgatgttgtcatcaaacgggccgcacaggctcaacagacgcgcattgtctgctggctccagggtgatttcgcgagtgtctatgttcaaaccgttcctcttatctgtatgccgccggaagctgaacattcaccggcctataaggaaattattcacgccacaggaaaaaggcgcaagcattgcaataaagatggggataaagagagaaaaaacaaggcccaccggaacggcaggcctgagaattacggctgataataacccacgccaaggtcgttttctttgcgggtacgggcaatcacactttccggtgtttctgccacgcgcagacccatttcatcttcagtacgcaccactttaccgcgcagagagttcgggtagacgtcggtaatttctacatcgacgaatttaccgatcatatccggcgtgccttcgaagttgaccacgcggttattttccgtacgcccggaaagctccatgatgctcttacggcttgtaccttctaccagaatacgctgggtggtgccgagcatccggcggctccacgccatcgcttgctgattaatgcgctcttgcagaatatacagacgctgcttcttctcttcttccggaacatcatcaaccatatcggcggctggtgtacccggacgtgcagagaagataaagctgtagctcatgtcgaaattgacgtcggcaatcagcttcatcgttttctcgaagtcttcggtggtttcgccagggaagccaacgatgaaatcagaactgatctgaatatctggacgcgccgcacgcagtttacggatgatcgctttgtactccagcgccgtatgggtacggcccatcaggttcagaatgcgatcggaaccgctctgtaccggcagatgcaggaagctcaccagctccggcgtgtcgcgatacacttcgatgatatcgtcggtgaattcgatcggatggctggtggtaaagcgaatacgatcgatcccgtcgatcgcagcaaccagacgcagcagatcggcaaagcttccggtggtgccgtcgtagttttcaccacgccaggcgttcacgttctgaccgagcaggttgacttcacgcacgccctgagccgcaagctgggcaatctcaaacagaatatcgtcggacggacggcttacctcttcaccacgggtgtaaggcaccacgcagtaggtgcaatatttattgcagccttccatgatggagacaaacgcggtcggcccttcggcgcgcggttccggtagacggtcaaacttctcgatttccgggaagctgatatctacaaccgggctgcggtcgccacgcacggagttgatcatctccggcagacggtgcagcgtttgcggcccaaaaataatatcgacatagtgggcgcgctggcgaatgtgctcgccttcttggcttgccacgcagccaccgacgccgataatcaggtctggattcttctcttttaacagtttccagcgacccaactgatggaagactttttcctgagccttctcgcggatactgcaggtgttcagcagcagcacatccgcttcttccgccacgtcggtcagttgatagccgtgggtggcatccagcagatcggccatcttgctactatcgtactcgttcatctgacagccccaggttttaatatggagttttttggtcatcgacttgctcttgcgaaatagtagccaggaatgcagggcgcatagtgtaatgctttgctgccgttgtgaccagtatgagcgttatcagcccttaggggtaaaaatcctgtaaacttaaagcatattgctaacaggatgattgaccatgacaaatcaaccaacggaaattgccattgtcggcggaggaatggtcggcggcgcactggcgctggggctggcacagcacggatttgcggtaacggtgatcgagcacgcagaaccagcgccgtttgtcgctgatagccaaccggacgtgcggatcagcgcgatcagcgcggctagcgtaagtttgcttaaagggttaggggtctgggatgcagtacaggctatgcgttgccatccttaccgcagactggaaacgtgggagtgggaaacggcgcatgtggtgtttgacgccgctgaacttaagctaccgctgcttggctatatggtggaaaacactgtcctgcaacaggcgttgtggcaggcgctggaagcgcatccgaaagtaacgttacgtgtgccaggcagcctgattgcgctgcatcgccatgatgatcttcaggagctggagctgaaaggcggtgaagtgattcgcgcgaagctggtgattggtgccgacggcgcaaatagccaggtgcggcagatggcgggaattggcgttcatgcatggcagtatgcgcagagctgcatgttgattagcgtccagtgcgagaacgatcccggcgacagcacctggcagcaatttactccggacggaccgcgtgcgtttctgccgttgtttgataactgggcaagcctggtgtggtatgactctccggcgcgtattcgccagttgcagaatatgaatatggcacagctccaggcggaaatcgcgaagcatttcccgagccgtctgggttacgttacaccgcttgccgctggtgcgtttccgctgacgcgtcgccatgcgttgcagtacgtgcagccagggcttgcgctggtgggcgatgccgcgcataccatccatccgctggcggggcagggagtgaatcttggttatcgtgatgtcgatgccctgattgatgttctggtcaacgcccgcagctacggcgaagcgtgggccagttatcctgtcctcaagcgttaccagatgcggcgcatggcggataacttcattatgcaaagcggtatggatctgttttatgccggattcagcaataatctgccaccactgcgttttatgcgtaatctcgggttaatggcggcggagcgtgctggcgtgttgaaacgtcaggcgctgaaatatgcgttagggttgtaaccttacaacattgccggatgcgtgccaaccgtaggtcggataagacgcggcagcgtcgcatccgacattgaaggataagacgtgtcaacatcgcattcgacattgaatgaacgcagaaaagcaaaaagctcgccgaagcgagcttttttaatgtggctggggtacgaggattcgaacctcggaatgccggaatcagaatccggtgccttaccgcttggcgataccccaactgggtgcacttacaaggtaagcgtcttgaataaattggctggggtacgaggattcgaacctcggaatgccggaatcagaatccggtgccttaccgcttggcgataccccaacaaattggttttgaatttgccgaacatattcgatacattcagaatttggtggctacgacgggattcgaacctgtgaccccatcattatgagtgatgtgctctaaccaactgagctacgtagccagattgtttcttcgatggctggggtacctggattcgaaccagggaatgccggtatcaaaaaccggtgccttaccgcttggcgataccccaataaccgggcggtgaaccgcttactcgaagaagatggctggggtacctggattcgaaccagggaatgccggtatcaaaaaccggtgccttaccgcttggcgataccccatccgtacaacgctttctggtgaatggtgcgggaggcgagacttgaactcgcacaccttgcggcgccagaacctaaatctggtgcgtctaccaatttcgccactcccgcaaaaaaagatggtggctacgacgggattcgaacctgtgaccccatcattatgagtgatgtgctctaaccaactgagctacgtagccatcttttttttcgcgataccttatcggcgttgcggggcgcattatgcgtatagagccttgcagcgtcaacctctttttcaaggaaaattgctcgaaagtgactgtttggttaggttgcgaacagcgtggcgctatattcgtcaattattgtttactttgtgttttttcccaccctacagccattcttttgtcatacaggatgaaattcggaatttaacaatagtggtgggaaattaatctatgaaatactggcctacagtgatgagttgtcaaacagtgatgtggcaaacccggaacatttccttactgcatatcagaatcaacaagcacctcaataactgaaacagccccggatttcaccggggctgtttcgcatttcttacttatacgcgctctggtgaacaccaaccgcgcgaccagacggatcgtccattttcttgaacgcttcatcccattcgatcgctttagcggaagaacaagcgacggaaggaccgcccggcacgcactcagcggcgctcggaagcgggaatagttcttcaaagatctcccgatacaagtacgcttctttagaggttggcgtgttgtacgggaagcggaagcgggcagtttccagttgctgatcagaaacctgctgcgcagccacttctttcagggtgtcgatccaactgtaaccgacgccatcggagaactgctctttctgccgccaggccacgcttgcaggcagatacgcttcaaaacattcacgcaggatgtgtttttccattttgccgttaccgcacattttatcctgtgggttaatacgcatcgccacatcaaggaattttttgtcgaggaacggaacgcgtgcttccacgccccaggcactcatcgctttgttggcacgcgcgcagtcatacatatgcagggccagcagtttacgcaccgtctcttcatgcagttctttggcattcggtgctttgtggaagtaaagataaccgccgaacacttcatcagaaccttcaccggacagcaccattttaatgcccatcgccttgatcttacggctcattaaatacatcggtgtactagcgcgaatagtggtcacatcataagtttcgatgtggtaaatcacgtcgcggatggcatccagaccttcctgtacagtgaagtgaatttcgtgatgcaccgtgcccagatggtttgccacttcctgggctgctttcagatccggactacccggcagacctacagcaaaggagtgtaactgcggccaccaggcttcagagcgttcctgatcttccacgcgacgggctgcgtatttcttggtgatagcggaaataatactggaatccagaccaccagaaagcagcacaccgtaaggcacatcagacatcagatggcttttaacactatcttccagtgcctgacgcagctcgtttttgtcggtcacgttatctttcaccgcatcgtagtcgaaccagtcgcgatgatagtaagaacggatttcgccgtcctggctccacaaatagctccccgccgggaactctttaatcgtgcggcaaactggcaccagcgctttcatttcactggccacatacagctgaccgtgttcgtcataccccatatacagtgggatgatccccagatggtcgcgaccaatcaggtaggcatctttttcgctgtcgtacagtgcaaaggcaaacatgccctgcaagtcgtcgagaaattccggccctttttcctgatacagcgcgaggatcacttcacagtcagacccggtctggaactggtaacgatcgccatattcggcgcgcaatgcctggtggttgtagatttcaccgtttaccgccagtacgtgggttttttgttggttgtagagaggttgcgcccccgcgttaacgtcaacaatactcagacgttcgtgggcgagaatggcgttatcgctggcataaataccggaccagtccgggccacgatgacgcatcaggcgactcagctcgagggctttcttacgcagctcaactgcgtctgttttgatatcgaatacgccaaaaatactacacataaccttctccgttaacctggtatttgttgcttgttgtgtttgcttgtttaaaaaaatgccgcaaagcagcactgtgcgcaagcgatttggcggtgaaaaaataaaaaacgtaatggtgattgtcgattggtgaaaaaaggtctggtgtgaggatatatttattgatgaatcgataatttttagcgggttttattgaatgtttatattttacgggggccaaattgctgacaaagtgcgatttgttcatgccggatgcggcgtgaacgccttatccggcctacaaaagcatgaaaattcaatatattgcaggagctgcgtaggcctgataagcgtagcgcatcaggcagtttggcgtttgtcatcagagccaaccacgtccgcagacgtggttgctattcagataacgtcgatttcagcgacactcgggtaaatccagctggggcggaaaggcatactgtcgatatcgtcgaggctgctaacaccagaaagcaccagaatcgtctccagacctgcctggaagccggccagaatatcggtacgcaggttatcgccgacaatcaccgtttcttcgctatgcgcctgcattttgtttaatgctgcgcggatgatccacgggctgggcttaccaacatagaacggtttgcgcccggagattttctcaatccctgcacacaacgcgccacaagcgggataaaaaccgcgcccgtgggtgtccggattggtggcgataaaacgtgcaccgttagcgacgaaataggctgctttatgcatcatgtcccagttgtaggaacgcgtttcgccaacaatcacgaaatcagggttcacatcggtaatagtgaaaccggctttgtacagttcatgaatcagtgcgccttcgcccaccacatacgctttcttgccttcctggcgacgcaggaaatcggcagtcgccatcgcagaggtataaaacacgctgtcaggtacatcgacacctgcggtggcaaagcggttcgccagatcttgcccagtctggctaggatagttggtcagcaacaccagcggcaggcctttatccataatcccgtgcaaaaattccgctgcacccggtacggcgacgttatcgtgcatcagcacgccgtcgatatcgcaaattacatttttaatggtcatggactacccagaatattgacaacaataagcgccactataaaagcacattaattttccagcaaatgctggagcaaaataccgttgagcatggcgcgttttaccagcgcaaaagcgccgattgcgctgcggtgatccagctcagaacgtaccaccggcagattagtgcgaaacgccttcagcgcctgggtattaatgcagctttcaatagcagggagcagcactttatcggcttcggtgatttcaccggcaataacaattttttgcggattaaataagttgatagcaatggcgatggttttacccagatgacgaccgacatactcaattacttcgctcgccagactatcgcctttgttcgcggctttgcagatagttttgatggtgcagtcgtccagcggcacgcggctctggtagccctgctttaacagattcaacacccgttgttcaatggcagcgttggcagcgatagtttccaggcagccaaagttgccgcagtggcagcgttcacccagcggttcgacctgaatatggccaatttcaccgacgttgccgttgcggccaataaaaatgcgcccgttagagataatcccggccccggttccgcgatggacacgcaccagaatggagtcttcgcaatcctgacttgcaccgaagtagtgctccgccagcgccagactacggatatcgtgaccaacgaaacaggtcactttaaaacgttcttccagagcttctaccagcccccagttttctacctgaatatgcggcatgtaatgaattttgccgctgtccgggtcaacaagccctggcaggatcacgctaatcgcgatcagctcgcgcagtttgcgctggtagctatcaataaactgagcaatggcattcaacagggcatgttccagcgtttgctgggtacgttccggcagcgggtaatgttcttctgccagcactttgctgctgagatcaaacagagtgatggtggcgtcatgacgaccaagccgtacgccgattgcgtggaaattgcgggtttcggtgacgatggagatagcgcggcggcccccggtggaggcctgctgatcaacttctttgatcagcccgcgttcgataagctgacgcgtaattttggttacgctggcgggggcaagctggctttgctcggcaatctgaatccggctgattggcccgtactggtcaatcaggcgataaaccgccgcgctgttaagctgttttacgagatcaacattacctatctgagcttgtccgcctggtgtcatactttctcttattgagttacgacctcgttaccgttaacgatggtcttggtgattttaaaatcaggtgtgaatgcagtcaggttggctactttacctgcggcgagtgtgccgagacgtttctcaacgccaatcgcacgcgccggatagagcgtcgccatacgtagcacttcatccagtgcgataccgcaatgttcgaccagattacgcacgccttcaatcatggttaaggaactaccgcttaacgtaccgttctcatccacacaaagtccgttacggtagtatattgttttacccgcaaaaatgaactgttcaatgttggcacctgctggcgcggtggcgtcagtaaccagacacagtttgtcgcctttcagacgtttagcgttgcgaatgttggcgtaatcaacatgcaggccatcagcaataataccgcaataaatgtcagcttcgtcgaggatcgcgcccgccaggccaggttcacgaccggtaatatacggcatcgcgttgtacagatgggtggcaaaggtaatccccgcgcggaaaccggcttttgcttctttcaacgtcgcgttggagtgaccggcagaaaccacaatcccggcatttgccagtttgctgatgacttccgcaggaaccatttccggtgccagggtcactttggtaatgacgtcggcgttttcacacaggaaatcgaccagcgcggcatcaggcttacgcacaaaattcggattatggatgcctttttttaccagattcagccacggaccttccagatgcagacctaacgcctgattcggatgttttgccaggtactcgcgcataacgcgcacgccctgtttcatcagctcatcgctggtggtgataagcgtcggcagatagttagtacagccacttttctcattggctttctgcatgatttccagcgtttccacgctgaccgcttcagcggtgtcgttaaactgtacgccgccgcagccgtttaactgcacatcgataaaaccgggggagagaatggccccgttcagactacgttgttcgatctctggcggcagttccgctaccggacagacgcttttaatcaggccatcagcgataacaaccgcgtggtcatcaagaaattcgtggccggtaaagatccggccctgggttaatgcatacattctgacccccgattttaaaaaatattgccctgagcaaggagccagggcagggataacaattacagacctttgatattttctgcttctaattcattgaaatatcttaaagtcttaactttcagctccatggtggaaggttcatcgcacaccatgatcgctttcggatgcagttgcagacagctgatggtccacatatggttcacgcaaccttcaacggcggcctgcagcgccagtgctttctggctacccagcaccagaatcatcacttcttcggcatccagcagtgtaccaacaccgacagtcagggcatattttggcacctgattaacatcgttatcaaagaaacgagagtttgcgacgcgagtgtcatgagtcagggttttgatacgagtacgagaagccagagaagacgccggttcgttaaatgcaatatgaccgtcgttacctacaccgcccataaacagatgaatttttccgtaagaacggattttttcttcatactggcggcactcggcgtcgatatccggggcgttgccgttgagaaggttgatgttttctgctggaatatcaacgtgatcgaagaaattacggtgcataaagctgtagtagctttccggatgctctttcggcagaccgacatattcgtccatgttgaaggtgacaacgtgcttaaagctgacctggcctgctttatgcatttcgactaacgctttataggtggtcatcggcgtgccgccagtcggcaggcccagtacaaacggacgatcggcagtcggtttgaacgcattgatacgattgacgatatggcgagcagcccatttgccgacctgttcagcggtagtcagggggatcagtctcattattcacctcaataagtaaaatgtaagccgttggcggattaggcatctttaagcgtaacctggatttgcgcagacaggcgtcaatccgacctgattttttgaatgataaaataagttttctggtttagccagtaaaagggagtgataataacgatatttggtgacaaaactcacaaaagacacgcgtttaatttgcgatacgaattaaattttcacacactctgtagcagatgatctaacaatctgattacagaacatcggcagtacaatttgcagcaaaataaaaatacggcttgaaacgagccaaatagggttctcgtagggggaataagatgaatattttaggttttttccagcgactcggtagggcgttacagctccctatcgcggtgctgccggtggcggcactgttgctgcgattcggtcagccagatttacttaacgttgcgtttattgcccaggcgggcggtgcgatttttgataacctcgcattaatcttcgccatcggtgtggcatccagctggagcaaagacagcgctggtgcggcggcgctggcgggtgcggtaggttactttgtgttaaccaaagcgatggtgaccatcaacccagaaattaacatgggtgtactggcgggtatcattaccggtctggttggtggcgcagcctataaccgttggtccgatattaaactgccggacttcctgagcttcttcggcggcaaacgctttgtgccgattgccaccggattcttctgcctggtgctggcggccatttttggttacgtctggccgccggtacagcacgctatccatgcaggcggcgagtggatcgtttctgcgggcgcgctgggttccggtatctttggtttcatcaaccgtctgctgatcccaaccggtctgcatcaggtactgaacaccatcgcctggttccagattggtgaattcaccaacgcggcgggtacggttttccacggtgacattaaccgcttctatgccggtgacggcaccgcggggatgttcatgtccggcttcttcccgatcatgatgttcggtctgccgggtgcggcgctggcgatgtacttcgcagcaccgaaagagcgtcgtccgatggttggcggtatgctgctttctgttgctgttactgcgttcctgaccggtgtgactgagccgctggaattcctgttcatgttccttgctccgctgctgtacctcctgcacgcactgctgaccggtatcagcctgtttgtggcaacgctgctgggtatccacgcgggcttctctttctctgcgggggctatcgactacgcgttgatgtataacctgccggccgccagccagaacgtctggatgctgctggtgatgggcgttatcttcttcgctatctacttcgtggtgttcagtttggttatccgcatgttcaacctgaaaacgccgggtcgtgaagataaagaagacgagatcgttactgaagaagccaacagcaacactgaagaaggtctgactcaactggcaaccaactatattgctgcggttggcggcactgacaacctgaaagcgattgacgcctgtatcacccgtctgcgccttacagtggctgactctgcccgcgttaacgatacgatgtgtaaacgtctgggtgcttctggggtagtgaaactgaacaaacagactattcaggtgattgttggcgcgaaagcagaatccatcggcgatgcgatgaagaaagtcgttgcccgtggtccggtagccgctgcgagtgctgaagcaactccggcaactgccgcgcctgtagcaaaaccgcaggctgtaccaaacgcggtatctatcgcggagctggtaagcccgattaccggtgatgtcgtggcactggatcaggttcctgacgaagcattcgccagcaaagcggtgggtgacggtgtggcggtgaaaccgacagataaaatcgtcgtaagtccagccgcagggacaatcgtgaaaatcttcaacaccaaccacgcgttctgcctggaaaccgaaaaaggcgcggagatcgtcgtccatatgggtatcgacaccgtagcgctggaaggtaaaggctttaaacgtctggtggaagagggtgcgcaggtaagcgcagggcaaccgattctggaaatggatctggattacctgaacgctaacgcccgcagcatgattagcccggtggtttgcagcaatatcgacgatttcagtggcttgatcattaaagctcagggccatattgtggcgggtcaaacaccgctgtatgaaatcaaaaagtaatctgctttatgcctgatgcgacgcttgagcgtcgcatccaacaatgacaagcggtggagatcttctctgccgctttttttttcatcaatcatccccataatccttgttagattatcaattttaaaaaactaacagttgtcagcctgtcccgcttataagatcatacgccgttatacgttgtttacgctttgaggaatccacgatgagtgaggcagaagcccgcccgactaactttatccgtcagatcatcgatgaagatctggccagtggtaagcacaccacagtacacacccgtttcccgccggagccgaatggctatctgcatattggccatgcgaaatctatctgcctgaacttcgggatcgcccaggactataaaggccagtgcaacctgcgtttcgacgacactaacccggtaaaagaagatatcgagtatgttgagagcatcaaaaacgacgtagagtggttaggttttcactggtctggtaacgtccgttactcctccgattattttgatcagctccacgcctatgcgatcgaactgatcaataaaggcctggcgtacgttgatgaactgacgccggaacagatccgcgaataccgcggcaccctgacgcaaccgggtaaaaacagcccgtaccgcgaccgcagcgttgaagagaacctggcgctgttcgaaaaaatgcgtgccggtggttttgaagaaggtaaagcctgcctgcgtgcgaaaatcgacatggctagtccgtttatcgtgatgcgcgatccggtgctgtaccgtattaaatttgctgaacaccaccagactggcaacaagtggtgcatctacccgatgtacgacttcacccactgcatcagcgatgccctggaaggtattacgcactctctgtgtacgcttgagttccaggacaaccgtcgtctgtacgactgggtactggacaacatcacgattcctgttcacccgcgccagtatgagttcagccgcctgaatctggaatacaccgtgatgtccaagcgtaagttgaacctgctggtgaccgacaagcacgttgaaggctgggatgacccgcgtatgccgaccatttccggtctgcgtcgtcgtggttacactgcggcttctattcgtgagttctgcaaacgcatcggcgtgaccaagcaggacaacaccattgagatggcgagcctggaatcctgcatccgtgaagatctcaacgaaaatgcgccgcgcgcaatggcggttatcgatccggtgaaactggttatcgaaaactatcagggcgaaggcgaaatggttaccatgccgaaccatccgaacaaaccggaaatgggcagccgtcaggtgccgtttagcggtgagatttggattgatcgcgccgatttccgcgaagaagctaacaagcagtacaaacgtctggtgctgggtaaagaagtgcgtctgcgtaatgcttatgtgattaaggcagaacgcgtcgagaaagatgccgaaggtaatatcaccaccatcttctgtacttatgacgccgataccttaagcaaagatccggcagatggtcgtaaagtcaaaggtgttattcactgggtgagcgcggcacatgcgctgccggttgaaatccgtttgtatgaccgtctgttcagcgtgcctaacccaggtgctgcggatgatttcctgagcgtgattaacccggaaagcctggtgatcaaacagggctttgctgaaccgagcctgaaagatgcggttgcgggtaaagcattccagtttgagcgtgaaggttacttctgcctcgatagccgccattctacggcggaaaaaccggtatttaaccgcaccgttgggctgcgtgatacctgggcgaaagtaggcgagtaattttaagtttcgctatgccggatggggcgtttacgtcgcatccggcaaggaacagacaaacagtttcaaacgctaaattgcctgatgcgctacgcttatcaggcctacatgatctctgcaatatattgagtttgcgtgcttttgtaggccggataaggcgttcacgccgcatccggcaagaaacagcaaacaatccaaaacgccgcgttcagcggcgttttttctgcttttcttcgcgaattaattccgcttcgcaatttatccataaaataaatttaaaataacaaaacataattaaataaaatgtaaccgctttcatcttgctggaatttcacgcttttattcttctgcaagcctttcaaccgcaaacttaagccttgtaacaaaaatcatcaaaatatgtgcggttgctcatgttcttacattctggttacagaaagagattgataattcgcgtcgcgaaaaatagtctgttcctgtagtcagcgagacttttctcaacgctacttttttaatttttattttttcgctgttcacctttggtgcagcaatttatacgtcaaagaggattaacccatgcgtacgtttagtggcaaacgtagtacgctggcgctggctatcgccggtgttacagcaatgagcggctttatggcaatgccggaggctcgcgccgaaggattcatcgacgatagtaccttaaccggcggtatctattactggcagcgtgaacgcgaccgtaaagatgttaccgacggcgacaaatacaaaaccaacctttctcactccacctggaatgccaacctcgattttcagtccggttatgctgctgatatgttcggccttgatattgctgcgtttacggcgattgaaatggcggaaaacggcgacagctcccacccgaacgaaatcgcgtttagtaaaagtaataaagcctatgacgaagactggtccggcgacaaaagcggtataagcctgtataaagctgcggccaaatttaaatacggtccggtttgggcgagggcaggttacattcagccaactggtcaaacgctgttagcgccgcactggagctttatgccaggtacttatcagggggcggaagccggggcgaattttgattacggcgatgctggtgcgttgagtttctcctacatgtggaccaacgaatacaaagcgccgtggcatctggaaatggatgagttttatcagaacgataaaaccaccaaagttgattatctgcactcctttggggcgaaatacgacttcaaaaataacttcgtactggaagcggcatttggtcaggcggaagggtatatcgatcaatattttgccaaagccagctacaaatttgatatcgccggtagcccgttaaccaccagctaccagttctacggtacccgagataaagttgacgatcgcagcgtcaacgacctttatgacggcaccgcctggctgcaagcgttgacctttggttaccgggcggctgacgtagtggatttgcgcctcgaaggcacctgggttaaggctgacggtcagcagggatacttcctgcaacgtatgactccaacctacgcttccagtaacggtcgcctggatatctggtgggataaccgttctgacttcaacgccaacggcgaaaaagcggtcttcttcggtgcgatgtatgacctgaaaaactggaatcttccaggcttcgccatcggcgcttcctacgtttacgcatgggatgctaaacctgcgacctggcagagcaatccggatgcgtactacgacaaaaaccggactattgaagagtctgcctacagcctggatgcggtctataccattcaggacggtcgcgccaaaggcacgatgttcaaactgcatttcaccgaatacgacaaccactccgacatcccaagctggggcggtggttacggcaacatcttccaggatgagcgtgacgtgaaatttatggtaatcgcaccattcaccatcttctgatgcccgacgcggcaggttttgtgcctgccgcacgtttgaggaatttgctatgaaaaaactgattctcatcgccataatggcaagcgggctggtagcttgtgcgcaaagtaccgcgccacaggaagacagtcgtctgaaagaggcatacagcgcctgtatcaacaccgcacaaggtagcccagaaaaaattgaagcctgccagagcgtgttaaacgtgctgaagaaagagaaacaacatcagcagtttgccgaccaggaaagtgtacgcgtactggattatcagcagtgtctgcgtgcaacgcaaaccggaaatgatcaggcggtgaaagccgattgtgataaagtctggcaggaaatacgcagtaataacaaataagtgagagctgtaactctcgcttttcttatttcccttgcataaaaaagccaacccgcaggttggcttttctcgttcaggctggcttatttgccttcgtgcgcatgttcatcttcgcggcaatcgccttcggcacagtgaccgtaaagatagagactgtggttagtcaggcgaatgccatgttttgcggcaatttcacgctgacgcgcttcgatggaatcatcactaaattcgataaccttgccgcagtcgaggcagatcaggtgatcgtggtgatgttgctgtgtcagttcaaatacggatttaccgccttcaaaattgtggcgggtgacgataccagcgtcgtcaaactggttcagtacgcgatataccgtagccagaccaatttcttcacccatatcgatcagacgtttgtataaatcttccgcactgacgtgatggttgtccggctcctgaagaacttccaggatttttaaacgaggaagcgttactttcaggccagctttctttagggcggtattgttatcagtcatgcggaatctgtcctgttactaagcggttcacttcattagaagaagtgacagaatttgctcttgagataatgcgtatcattatagaattgccacgcctaaatgaaaaccacaagtccctggcaaatattgttaataaaaacgtggcacagcttacatttacaacggcaaggccacttgaacaccgggacattgtacaggtacaacagcaaaagttacaaatttgtagcaattattttgattggcattatctattaatacggcgtagacatgagtctacgccgcatcacatcaggcattgagaatttcgtcgagatgcaactcttcagaaatctgtttaacccatttttctacacgttcagcggtcagttccggctgacggtcttcgtcgatagccagaccgacaaagtggtcgtcatctgccagacctttacttgcttcgaaatgatagcccgcagttggccagtgaccaacgatggttgcaccgcgcggttcaatgatgtcgcggatggtgcccaatgcgtcgcagaaatattcggcgtaatcttcctggtcaccacaaccaaacagcgcaaccagtttgccgttgaaatcaatctcttcgagagtcgggaagaagtcatcccagtcacactgcgcttcgccgtaataccaggttgggatgcccagcagcagaatgtcataagcttccagatcttctttgctgctttttgcaatgtcatggacatcggcaacgtctttaccaagctgtttttgaatcatttttgcgatattttcggtattaccggtgtcgctgccgaaaaagatgccagtgatagccatgagtgaaataacctcttgaaacttattgaaatgggggtggaaaattgcccacggataaaggcaatcatagcagaacaggcagtcttgcggaatcagcaaacgagcaggactgcacactgtgctacatgaaagtggaaatttaaacgatgccctgactacgcagcgccgccagttgctgcattaacatctcttcgatcagttcgctacggctcatattgcggctctccgccagctcgttcagcgcctcgacagcttccgcgttcagcttcagttcgacacgcttaaggccacgtactttgtcgcgttttagctggttgcgtttattaatacgcagctgttcatcgcggctaagcggattagttttcggtcgtcccggtcgacgctcgtgcgcgaacagatctaatgtcgtacggtccgtttgttctttggccatgatcttggtgacttcgggggaaacaatcagccaggcctctgcccggatggatagcgcgccataatacatcagcgcgatgagtcacgccaacgcccacgcgcggaaagcgacgcggacgctgggtttttaatcagttgcgttaatcattgagatagcgacggatagcgcgtaataccgcatccggtttttcagcatggacccagtgacccgcgcctgcaatcacatgcgcccgtgcctgtggaaattgagccagtaaatcatcacggtactgctcgctaacatacggagaattgccgccagggataaacagggcagggtgatcccatgccgggattttctcccaacctacaatatgcggatactgatcccacaataccggcacgttaaagcgccactccccgtcaacaaaagatttcagcagaaactgaatcaccccttcttcattaagatgctggcgcattattgctgctgcttgctggcgagtttgtgcgtcgctttcactgaccgcgttgatagccgcaaaaatctcatcatgacggcgtacgtgatagtcgaccggcgcgatatcgatcgccaccagtttatcgatgcgatcggaggctagtgcagtaagtgccattaccgctttaccgcccatggagtgaccgataaatgttgctttgtcgatctgctgtgcatccagagtatcaacaagatcctgcgccatcgccgggtaattcattaccggatctctcggactaagaccgtggttacgcatatcaacctggatgatattgtgatcgtttaccagatcgcgagccagtacgccaaggttgtcgaggctgccaaacagaccgtggacaagaacgatgggagaattattgtgctggttttgtgcagtttgcgcgcggatattcaatttcatggcaaagttctttttttcgcgttgtcgggttagggtattatgttgaccattgtgccacagggctgcaacaaataaggtttattccgagtttttctgcaagccaggcttgacgctatccgctgccgggatttattcatatactcctggcgacttgtattcagctaagacactgcactggattaagatgaaaacgattgaagttgatgatgaactctacagctatattgccagccacactaagcatatcggcgagagcgcatccgacattttacggcgtatgttgaaattttccgccgcaagtcagcctgctgctccggtgacgaaagaggttcgcgttgcgagtcctgctatcgtcgaagcgaagccggtcaaaacgattaaagacaaggttcgcgcaatgcgtgaacttctgcttagcgatgaatacgcagagcaaaagcgagcggtcaatcgctttatgctgctgttgtctacactatattctcttgacgcccaggcgtttgccgaagcaacggaaagcttgcacggtcgtacacgcgtttactttgcggcagatgaacaaacgctgctgaaaaatggtaatcagaccaagccgaaacatgtgccaggcacgccgtattgggtgatcaccaacaccaacaccggccgtaaatgcagcatgatcgaacacatcatgcagagcatgcaattcccggcggaattgattgagaaggtttgcggaactatctaaaacgttgcagacaaaggacaaagcaatggcaatccacaatcgtgcaggccaacctgcacaacagagtgatttgattaacgtcgcccaactgacggcgcaatattatgtactgaaaccagaagcagggaatgcggagcacgcggtgaaattcggtacttccggtcaccgtggcagtgcagcgcgccacagctttaacgagccgcacattctggcgatcgctcaggcaattgctgaagaacgtgcgaaaaacggcatcactggcccttgctatgtgggtaaagatactcacgccctgtccgaacctgcattcatttccgttctggaagtgctggcagcgaacggcgttgatgtcattgtgcaggaaaacaatggcttcaccccgacgcctgccgtttccaatgccatcctggttcacaataaaaaaggtggcccgctggcagacggtatcgtgattacaccgtcccataacccgccggaagatggtggaatcaaatacaatccgccaaatggtggcccggctgataccaacgtcactaaagtggtggaagacagggccaacgcactgctggccgatggcctgaaaggcgtgaagcgtatctccctcgacgaagcgatggcatccggtcatgtgaaagagcaggatctggtgcagccgttcgtggaaggtctggccgatatcgttgatatggccgcgattcagaaagcgggcctgacgctgggcgttgatccgctgggcggttccggtatcgaatactggaagcgtattggcgagtattacaacctcaacctgactatcgttaacgatcaggtcgatcaaaccttccgctttatgcaccttgataaagacggcgcgatccgtatggactgctcctccgagtgtgcgatggcgggcctgctggcactgcgtgataagttcgatctggcgtttgctaacgacccggattatgaccgtcacggtatcgtcactccggcaggtttgatgaatccgaaccactacctggcggtggcaatcaattacctgttccagcatcgtccgcagtggggcaaagatgttgccgtcggtaaaacgctggttagttctgcgatgatcgaccgtgtggtcaacgacttgggccgtaaactggtagaagtcccggtaggtttcaaatggtttgtcgatggtctgttcgacggcagcttcggctttggcggcgaagagagtgcaggggcttccttcctgcgtttcgacggcacgccgtggtccaccgacaaagacggcatcatcatgtgtctgctggcggcggaaatcaccgctgtcaccggtaagaacccgcaggaacactacaacgaactggcaaaacgctttggtgcgccgagctacaaccgtttgcaggcagctgcgacttccgcacaaaaagcggcgctgtctaagctgtctccggaaatggtgagcgccagcaccctggcaggtgacccgatcaccgcgcgcctgactgctgctccgggcaacggtgcttctattggcggtctgaaagtgatgactgacaacggctggttcgccgcgcgtccgagtggcacggaagacgcatataagatctactgcgaaagcttcctcggtgaagaacatcgcaagcagattgagaaagaagcggttgagattgttagcgaagttctgaaaaacgcgtaaacacatttaataaaaaaagggcggtcgcaagatcgcccttttttacgtatgacaaacacagaattgcctgatgcgctacgcttatcaggcctacgaggatggtgcaatatattgaatttaagcgattttgtaggccggataaggcgttcacgccgcatccggcaaaaacaacgaacactttgtcaacaaactgagtagctcaaggaaatcccaatgaagaccaacaggagtctggtcgtcatagtgagtctaattaccgccacattactgctgactgcatgcgcccaacctgaacaaagtagtttagctggcgactggttactgacccctaaagataaaaccagaggattaacgggtagcattgcggtaaatattgcacctttccggtgtaagacaaattgccgtggtgataacttacctgataatacccgccgctggcagttgagtggcgggaacgaaaaagaacttacttatcttcataatatgagtgcacaagaaaaggtcggtttaaatcccggttggcaatgctacaccagtttttttatgcgggtttgccagggcaagcccggcactcgaccgatagtcaatgaggattatgtcagcgaaagcggattttttggcagcatgatgcatgtcgggattattgagttacgacgctgccagagtgaaaattgccagcaagaattgaaagcgataaatacacattaaaatagtgagtccgggaatgaaacccggacctgaacatgtcttattgcgtgaatgtttctttcatttgatactgcatttcccagagttcagtaaggctaataacttttcttgttcttgcttcttcactttgtacccataagaaagggtagaacgtgaaggcttccgttgcgcttaattttattacgtcttctcgccattgctgccatcgtacattttcatagaaggtatctaaatcaccggataatgcccactgaagaaactcagaatatccaacttccagactttcccaattcagcgtatctggcgcaaaataataaacgcagccagtatcttccccaagatcgccaccattaagagcaaaaattacccctgcgacatcgtcagcgatgggtaaagcccgcacgcctgcgaattcagggcgttgtgtccaacttactggatctcgtggcaaccgggggtgaccagatcctgctatgcgtaattaaccattatcaatcagcagacctccggagccatagacaagcgcacccatcggactttttgttgtcacctgtaattgataaagtgcggtttcggctaaatctttattaaccggtaagagttcggtatggtttgtggcgtcttttaaccagttctggattattggccaggcactatcttcagtatttactaactgattcatttcacgcatcgctacttgctccttgtgtgctacggtgtcatttatgatgaggaattgtatggaacattttttaaatattaagttccttatatttgaataaaaaatgactttatccatacattgccacttttttcaaagcataaaccgatacccaataccggtttcagtaataaaatggcgaggccgggccggatcctgttccagtttttgtcgcagatgccccatataattacgcaaatagttgctgtgttcgatcgcgtttagaccctacatctgccggatgcggcataaataacgaactatttgccaacaaacagaaagggcgatcattcaatcgcccttttttactttgttttattaaccgtgtttatttttcagttcaaagcgtggacttaccagaccatacagtgtccaaccaaggaaggtcacgatggaaccgtacagcatggcttcttccccggaactgtacagcgcataaaagctatacatcgcgccaacaaaagcaacaaagtttgcaactttcgctttactggggggcacattagcgaccttctgaataatgactaatgccgccatactcagaatatacggaatgatattggtcaccacggccaggttaaccagcacgttgaactgactgtttaggctcgggctaatggtcatcagtgccaatccactctgaataatcacaatggtcaacattccctgcaccggtgcatccactttggttacacgggagaaaattttagggaagtagccttcatcagaactagatttaaacacctgggcaatggtgaactgccagccaagtaggctaccgcagcaggacatcaccatcagcgccataatgactttacccacttccggcgtgaacatctgcgcgaaggccagaccaaatggtgccgtactatttgccagctccatatttggcacaatcccggcaatcacgttggtggagacgatataaatcaccgccgcacctaacgtaccgccgagtaccgcgattggcacattacgttccgggttttccactacatcagtattcgcacacgcagactccagaccaagaaaagcccacagcgtcatagcgatggaagaacctaccgcactgaagaacggtgcatgatgcggattccaggaatcaacgtacagcgtcgggctaaaccagaaccagccaataatgcacagaccgacgaccggaataatgaccccccacacggtaatgctactgatttgcccggtaatgcgcgcaccaccaaagttagccacggtacaaatccacagcaccccgatggtcgcaagaccaatctgcactgggctcaaactcgcgccgagcagttcggtgccgtaaccaaccgcgctaatagcaatcgcgacgttagcaatcagcagactgacgccgtaggtatagttcgccataaagttaccggatttaccgaaagcatactcggcataaccgcccataccgccacttttacggctgaacataccgcattttgcgaatgcccatgccagtgccatactgcctacggctgtcaccagccaggagataatactgattgtcccgacttcggcaagctttgtcggcagcatgatgataccggagcccatcatgttgaccatcgtcagtatggttaactgaacgacgcccattttgttgcttttagcctgactcataatttttcccctttcaacagggtgctttgcgcatcacgaggcttgatgacatagcaccaaacttgcttacgaccatcatgttcttcgatatagacaccctgcagctccggtgcaaaacctggcagcaggttgatcccttcttccagagcgctgaagtaacgcagaacagcaccaccccagatttcacccggaacaacacacagcacacccggaggataaggaagcgcaccttcggcagcgatacggccttctgcatccggcagacgaaccagttccacttcaccgcgtaaataggcgtagttggcttcttgcggattcatgctgacgcgtgggaagtgctccttacggaacatctctttttgcagttgtttcacgttgtggcgggcatacaaatcatgcatttcctgacacaactgacgcagggtataaccggcgtagcgctcttcatgctgtttgtagatggaaggtagcacttctgctaatggcgcgtcggactcaagcagtttttcgaagcgtaccagcagggcaacaagttgctgaagtttggccatatcttctgccggagtcagcaggaagaggatggagttaagatcgcatttttccggcactacgccattttcgcgcaggaagttagcaagaatcgtcgcgggtacaccgaacgcttcatattcgccgttacgtgcatcaatacctggggttgtcagcaacagtttgcatggatcgacaaagtattgattctctgcatagccttcaaaagaatgccagtgttcccctggtacaaactggaagaagcgcagatcaaccgcaatttgcgctgtttcatagctctgccagggtttaccatccaccagttcaggtacgaacggacgaatatgctgacagttatcgaggatcagtttgcgggcattaatgccatttaccacacaatccatccacatattacgaccgctgacaccttcatgcattttggcgttgatattcagtgcggcaaacagcggatagaacgggctggtggaggcgtgcatcataaaggcgttgttcatgcgtttgtgcggtacataacgctgttgccctttgatgtggctgtcttttttatgaatttgactagtctgagaaaaaccagcctgttgtttatgcacagattgcgtaaccagaatacccggatcgttctcattaagatccagcaacagcgggctacagtccgccatcatcggaataaactgttcatagccgacccatgcactgtcaaacaggatgtagtcacacagatgaccaattttatccaccacttggcgggcgttataaatcgtaccgtcgtaggtgcctaactgaatcacagcgaggcggaaaggacgagcctcttttgcccgctgcggtgcgacttccgcgatcagctcacgcaggtaactttcttcaaaacagtgcgcatcaatgccaccgataaagccatacgggttacgtgccgtttccagataaaccggtgttgcaccagcctgtagcaacgctccgtggtggttagatttgtggttattgcgatcaaacagcaccagatcacccggtgttagcagggcgtttaaaaccactttgttagaagaactagtgccatttaaaacgaagtaggttttatcggcattaaacacttttgccgcatgttgctgtgcaatgcatggcgcgccttcgtgaatcagcagatcgcccatcgctacgtcggcgttgcacaagtcggcacggaacagcgcctcaccaaagtattccacaaactgattccccgccggatggcgacggaaaaattcgccgccctgatgaccagggcaatcaaacgcgctgttaccttgattgacataatcgaccagtgcgcggaagaaaggtgggcgcagttgagtttcataatggctggcagcggtttctaactggcgaccataaaattctcgtcggctttcgcaattctcaaagacaccgctaatacggggcaaatactctgcgggtacacgttcttgattttcagtagcaataaataccgggatgccataacccgtggcatcgatttcatcgagttttccgcatgtaacatcgttgaggcttaaaactattgccgccacatcgatattacgactttcattaatgtagatacattctcgctgcgtggtaaaacagtccgggcaagaatcactaaccgcaatttttaatttactcatttttcatctctttattttaggtaatagcaggtcctcaatttctcgaatgagaaatcgatcgtgccggaaaaaagcaaagttaccccgctgataaataaatcaggtagattgcttttttcagaatgcagaaacccttaccagtcaggtggctgataatacaagggttaacagagaatgagcactgcggaatacaggcatatgcctgtaatacagagagtcaggaagacctgtacgctgaagtgcccttagtcggtagactaacgggcattgaagaagtgaaagtcgaagctattgcgatgagcaaacttcataatatgagttgtccgccttatatggggcatagtgcggctgttattttccatttaatttacctttcctgatgtgaatgaaggtgaagatattctatccaggaaatacggttgaactgtgaaggtgatcaataaaaaatgatcaatcttaatttatttaatgatgagctttttactcagtaatataaaatattgaattgttatttttgtgtgttgtttaagataaaaagccgtatttattattacggctttaattaataaaaggcaggctgtattaaaattaatattcaaagcataaaccgatagccaataccggtttcagtaatgaaatggcgtgggcgggcgggatcctgttccagtttttgtcgcagatgtcccatataaatacgcaaatagtgactgtgttcgaccgcgtttggcccccacacctggttaaggagctggcgctgggtgagtacttttccggcattgttgagcagcaccgccagcaggcggaactcaattggtgtgagatgcacctcttcctcaccccggtgaatcacgcgggcggctaaatcgacggtaacatcggaaaattttaccagcggatcgggcgcggtggtggcagagtggcggcgtaatgcgacgcgcagacgggcctgcaattcgccaatgccaaacggcttactcagataatcatccgctccggcatccagcgcggcgattttgtcgctctcttcgctgcgtgcggaaagcacaatcaccggcaccgcgctccactggcgcaggtcgcggataaactcaatcccatcaccatcgggcaggccgagatcgagaataatcaaatctggcttacgggttgccgcttccagcaagccgcgttgcagcgtttcggcctcaaagacgcgcatcccgtcgccctccagcgccgtgcgcagaaagcgacgaatagcctgttcatcttcaacaatcagaacgtttgtcacatatcctcatgaaattcttcaagttcaggggcagtttgctggggaagtgtaacacgaaaacaggcaccaccttccggtcggttgaacgcggtaatagtgcccccgtgtacatccactatcgcccgacaaattgccagtccaagccctacccccggtactgcgctctctttattcccgcgagcaaacttatcaaatatcgtctgctcctggcctggcggaagaccggggccgttatcccagacatccagttgtagattttcgccctcaacgtgggcatcgataccaatttcggcctgcgcacccgcatatttcaccgcgttctccagcagattaatcagcacccgttcaaagagtggcccgtcaacgtggattaaggtcagcggttctggcagagaaagattgatggggctgcttaaacccggttccagcatttgcagcgcgctgccgactacttcttccagcgttaaccactctttcttcaaattaaagccgccggactgaattcgcgccatatccagtagattattcaccagtcgggtagtgttcagcacatgctgacggatctcgctggcctggcgggcgtggggacttccttcgcttgccagatcgagcgttaagatttctgcctgaccaaacagcaccgtaagcggcgtgcgtaaatcatggctaagcgccgccagcagggcgttgcggatctgttcacgttcgcttgccatccgcgcctgttcttcgctggcggttagcgtcagccgctcaagggcattggcgactaacagcgtaaacgtctccagcaggcgctgctgttccgggatcatcaactggcgcagattccccggctccaccaccaccagcccgtaggttttctcgccgctttttagcggcaaaatctggtacggtacaccgggtaacgtgtcggtgcccgcgcccgcaggcaggcctttatcaaaactccactgcgcgatggcatcgtcccacggcgtcattccttgcggatgtgttaacggctgcaatttaccgttgtcatcgggcaacaacacctgactgcgggcatgaaacgtggaggcaataaattgttcgctggtggcagcgatatcctgcggactgcggcccaccgccagagctttgctcatttcatataagtgccgtgtgcgttgctcgcggtaacgggctacccgcgcctgataacgcacgccagcagtaaggttcccgatcaccagcccgacggttaacatcaccgcgaaggtcagcagatattacacatcagagacggcgagcgtgccgcgtggggcgataaaaaagagatcgaaactcactacattaatgacggtggcaaccacactaggccagcgtccataaaatagcgccaccaccaccacgccaagcagatacagcatcaccaggttggcggcatcaaacgccatcagccactgcatggcaattaaggtgataacggcgcataacgcggcggcaaccacgcatccctgaatttgtacacgccacttgtctttaaaagagcggttatccggcgcgttgttaatcgtgcgggcgggtggttcatcaagcgcgaccagcacctgatcgagatcgggggcgatgcgcgccagtcggtcagcaaacgtttcccgacgccaccagcggcggctggccgggcgaccgagaataatcttgccgagattatgttcacgggcataacgcactaccgctttctcttccgctggatcagaaagtgttgccgtctccgcgcccagttcctgcgccagacgtaaggcgctgagaattgcccgacgttttttttccggtaagcggtgcagggcaggggtttcaacatacaccgcgtgccagacgctacccagccgactcgccagccgcgccgctgcgcggaccagtttttcgctgccggtgttatggccgatgcataaaaggatcgcgtcgcgcgtgcgccacactttctcttcgccaggatgcccccgccaggcgcgcatttgctcatcaacgcgatcggcagtacggcgcagtgccagttcgcgcagggcgatcagattacctttgcggaaaaaatgttcaatggcgcgctccgcctgcccggcaatatagactttgccttctttcagccgctggcgcagatcgtccgggggcaagtccaccagcaccacgtcgtcggcggcatcgaaaaaaggatcgggcacggtttcccgtacctgaattccggtgacgccgctgaccacatcattcagactttccagatgctgaacgttgacggtagtgaaaacatcaatgccagcttccagcagttcttcgatatcctgccagcgtttgggatgacgggaacctggcgcattactgtgcgccagttcgtccattaagatcagcgccgggcggcgggcgagggcggcatcgagatcaaactcgctgatatgccgcccacggtacgcctggcgttttaacggcagaacagccagcccttccagcatggcggcggtatcttttcgcccgtgggtttctaccacgccaaccacaatatccagcccttgcgcccgcagtcgctgggcttctgccagcatcgcccaggtcttcccgacgcctgcacaggcaccgaagaaaactttcagcttcccccgatgcggcgcggcagtttgttccagcagacgatcggggtcgggacgtaagggttcgttattcatcaagtttatccagcgccagattgagttcaacaatgttgacaaccggctggccgatatatttcaccagcggttgttggctgtattttgcgatcagttgcgtgagctgttcaacgctgagattacgcgctttcgccacgcgtgggatttgccaggccgccgcttgcggggtgatattattgtccagcccgcttgcgcttgccgtcaccagttcaaccggaacgctcgcgctggcatccgggttagcggcccgtaatgcagcaacgcgtgcggctattagtttatccagctcagggttactgaccgccagattgctcccgccagaagcctgtggattatagggcatttctgccgttgcgctcgggcgaccatgaaaatagccgttgccggtaaaattctgcccgattaatgcgctaccgcgcaccgtatcaccttcacgaatcaagctaccattggcctgccagggaaaccaccattgccccagtacggtggtcagcagcgggtaaacgccgccagtaatcaataacagaaagataaatgtacttaatgccggacgtaatccactcatggtaaacctcacaccagaccgcaaacggtcagcagtaaatcaatgactttgataccgataaacggcaccagcagcccacccagaccgtaaatccataagttacggcgcaacatggcagaagcggtaagcggtttataactcacgccttttaacgccaggggaatcaaaaagacgataatcaaggcgttgaaaatcaccgcactgaggattgcggagtcggggctatgcaggcacatgatgttcagcgcatttaactgcggatacgttgccgcgaatgccgccggaataatggcgaagtatttcgccacatcgttggcaatgctgaaggtggtcaggctgccacgggtcatcagcatctgtttgccaatgtgcaccacctcgatcaacttggtcgggttagagtcgagatcgaccatattgcccgcctctttcgccgcctgggtgccggagttcatcgccaccgcgacatctgcctgcgccagcgccggagcatcgttggtgccgtcgccggtcatcgctaccaaacgaccttccgcctgatactgacggatcaatgccagcttggcctccggtgtcgcttcggcgagaaaatcatcgacacccgcttccgcagcaatcgcggcggcagtcagacggttatcgccggtaatcatcaccgttttaatgcccattttgcgcagctgggcgaagcgctctttaataccgcctttgacgatatctttcagcgcaataacgcccagcacacgagaaccttccaccaccaccagcggcgtggctccctgacgcgcaacctgatcgactttttgatcaacatcggtagggaagtgaccaccgttagcctcaacatggcgacgaatggcatcgacagaacctttacggatcatgcggttgtcgatgttgatcccgctcatccggctttgcgcagtaaacggtacaaaggtggcatggaggctctgcacatcgcgctcgcgcaggttaaaacgctgcttggcgaggatcacaatactgcggccttccggcgtttcatcagccaggctagccagttgtgcggcgtcagccagcgttttttcatccacgccctgcgcggggataaactcgctcgcctgacggttaccgagtgtgatggtgccggttttatccagtagcagaacgtcaacgtcacctgccgcttcaactgcacgtccgctggtggcaatcacattcgcgcctagcatccggctcatcccggcgacgccgatcgcactcaacaggccgccaatagtggttgggatcagacagaccagcagcgccaccagtaccgttacgctgactgcattaccgccccacgcggaaaacggccacagcgtggcggttgccagtaaaaagacgatagtcagggcaatcagcagaatggtcagggcaatttcgttcggcgttttgcgtcgctgtgcgccttccaccatcgcgaacatccgatccagaaatgtctcgccggggttaacgctacactcaatcaccagccagtcagaaagaatacgcgtgccgccggtgacggaggcaaaatcgccgccggattcacggatcaccggtgcgctttccccggtgatggcgctttcatcgacgcttgcacccccttcaataacttcaccatcgcaggggataatatcgccagcttctaccagtacgatatcgcctttacgaagttggtcggcaggaactttgtccgccgcagcgccatatttcggctcacgcagcttgcgggcaaaggcagtttttttcacccctttcagactgttggcctgcgctttactgcggccttctgccagcgcctcggcgaaattagcgaacagtacggtgatccacagccaaccgctaatggccgcgctaaacagcgcattgccgggcatcgcaccgcttgccatcgcgatgctaatacaggtggtcagcagactgccgatccagacgataaacatcaccggattgcgccattgcgcctgcgggtttaattttttcaccgcttctttcagcgcctgaacgacaagtgttggttcgaatagcgccagttgtttacgactcatattcagtgctcactcaatatcatcaggagagatattccgccaccggaccaagcgccagggcagggataaaggtcagtgcgccaaccagcaacacggtgccgattaacaggccaacaaacagcgggccgtgcgttggcagcgtgccggagctggcggcttggctctttttactcaccaggctaccggcaattgccatcaccgggataatcaccccgaagcgaccgacaaacatgcagaacgccagtaaacagttccagaacggagagttggcgcttaatccggcaaaggcgctgccgttgttgttagcggcggaactcacggcgtacagcacttcgctaaaaccatgcgggccagggttgagcatggcgctacgtccggcgtcggtcatcatcgccaacgccgcgcccatcagcaccagcgtcggggtaaccagaattgccagtgcagtcagtttcatctcgcgtacgtcgatttttttacccagatattccggtgtacgaccaatcatcagcccggcaataaacaccgccagcaggacaaacagcatcatgccgtaaagaccagaaccgacaccgccgaacaccacttcaccaatttgcatcagccacatcggcaccatgccaccgagagcggtaaagctatcatgcatcgcaatcaccgcgccacaggaagccgccgtcgtcacgaccgcaaacaggctactgaccagcacgccgaaacggctctctttaccttccatattgatgctgctgtccgtgcccagtgccagcagatgaggattaccctgaacttctgcccacatcaccacgcctacgcagatgacaaaaatcacactcatcgcccacagcaacatgcgcccctggcggcgatcgcccatcacttcaccaaaggcaaagcacagcgccgttgggatcaagaagatcgccagcatctgcacgaagttggtcagtgcggttgggttttcaaacggatggctgctgttggcattaaagaagccaccgccgttagtaccgagcatcttgatcgcttcctgagaagctacaggccccatgggtaacagctgttgcgctccttcaacggtattcacagcctgataaggcagaaagttttgcagcgcaccttgttgaataaaaaacagtgcaatcaacaacgccacagggactagcacccataacgtgatgcgtagcagatcgacccaggcattcccgagcgtgctcatgctctggcgggtaaacgcacggatgagggcaaaaatcaccgcaatcccgctggcggcagaaagaaagttttgcaccgttaagcccgccatctggctgaaatagctcaacgtggtttcaccgctataagattgccagttggtattggtgacaaagctgacggcggtattcagcgccagatcccagctcagccctggcaactgctgtggattaagcggcagatagtgctgaccgagcaacataaaaaacagcaccgccagccccagcatgttcaggccgagaatggcacaaagatattgcttccagttcatctcacggtcagagacgccaagtgcgcgaaaaagtacgcgctcaacgcccgttgtaccgggaagaggaatgtcattaatcagccgcgccagcccgctgcctaaaggacgcgccagcaccattaacaccagtaaaaacgtggcgatcagtaagaacccttgcgcagccatcagaacgcctccgcattgatcagggcataaaccagataacccagtaataaaaacaccagcaatacgccggttatcacgcctgcactcacagtgcacctccagtggcctaaaagtgataccggaagggtagaattctggctgcaaagatttcgcaaaaatctgcgggcggggtgtaaaaaaagtataaaaatggcaaaagccatgatttaactaatgtttagtattaatttaacttttgtgtaacttaattacaggatgaatgtaaataaaccatcaataagcaaaaataagtggtcggatgagtagtaaaattacacaaaaggcggtactattttcatcagataaacaaattcatttttccggtgccattcaccgggtagatacaaaagggggagaaaagtatggaactctacagagaatatcctgcatggcttatctttttacgccgtacttatgcggttgcagcgggcgttctggcgctgcctttcatgcttttctggaaagaccgcgcccgcttttacagctacctgcatcgcgtctggagcaaaaccagcgataaaccggtgtggatggatcaggccgaaaaggcaactggtgatttttattgattgctgagttttgaatacattgaacgtctacacttactcctgtaaaccgctcaggagcagtaatgaatctacaacgatttgatgacagcaccctaatccgtatctttgcccttcatgagttacatcgactgaaagaacatggcttaacgcgcggggcgcttctcgattatcacagccgctataaactcgtctttctggcgcattctcagccggagtaccgcaaacttggcccgttcgtggctgatattcaccagtggcaaaatctggatgactattacaaccagtaccgccaacgcgtagttgttttgctttctcaccccgccaacccgcgcgatcacaccaatgttttgatgcacgttcagggttattttcgcccgcatattgattccacagaacgccagcagctggctgcgcttatcgacagttatcgccgtggcgagcaaccacttcttgcgccgctgatgcgtatcaaacactatatggcgctttatcctgacgcctggcttagtgggcagcgttatttcgaactttggccgcgtgtgattaacttgcgccatagtggagttttatgactacccatctggtctggtttcgccaggatttacgtctgcacgataatctcgcactggctgccgcctgccgcaatagctctgcacgcgtgctggcgttgtatatcgctacaccacgccagtgggcgacgcataacatgagcccgcgtcaggctgaacttatcaatgctcaactgaatgggctacaaatagcgcttgcggaaaaaggtattcctttattgttccgtgaagtggatgactttgtcgccagtgtcgaaatagttaaacaggtgtgcgcggaaaacagcgttacccacctgttttataactatcagtatgaagtgaatgagcgggcgcgggatgtggaagttgaaagagcgctgcgtaacgtggtgtgtgaaggatttgatgacagcgtgatcctgccgcctggcgcggtgatgaccggtaatcacgagatgtacaaagtctttacgccttttaagaatgcctggctgaaacggctgcgggaagggatgccggagtgcgtcgctgcgccaaaagttcgtagtagcggaagcatagagcccagcccatccattacgctgaattatcctcgtcagtctttcgatactgcgcattttccggtggaagaaaaagcggcgattgcgcaattacgccagttttgccagaacggtgccggagaatatgagcaacaacgagattttccggcagtggaaggcaccagccgtttgagcgccagcctggcaacgggcgggttaagccctcgccagtgcttgcatcgcttgttggctgaacagccgcaggcgctggacggtggggccggtagtgtctggcttaatgagctgatctggcgcgagttttaccgtcacctgataacgtatcaccccagcttgtgtaaacatcgtccatttattgcctggacggatcgtgtacagtggcagagcaatcccgcacatttacaggcctggcaggaaggcaaaacgggatacccgattgttgatgccgctatgcgtcagcttaacagcactggctggatgcataacaggctacggatgattacagccagttttctggtgaaagatttattgatcgactggcgcgaaggcgagcgatatttcatgagccagctgattgatggtgatttggcagccaataacggtggctggcagtgggccgctagtaccggaaccgatgcagcgccgtattttcgtattttcaacccgacaacccagggcgagaaatttgatcatgagggcgagtttatccgccagtggctaccggaactgcgcgatgtgccagggaaagtggtgcatgagccgtggaagtgggcgcagaaagcaggtgtgacgctggattatccgcaaccgatagtcgagcacaaagaagcgagagtacaaacgttggcagcgtatgaggcggcgcggaaggggaaataacagacgcgtcaggcaatcgagcccagatgccggatgcggcgtgaacgccttatccagcctacaaatttgtgcaaattcaataaattgcaggaaatacgtaggcctgataagacgcgtcaagcgtcgcatcaggcatcggtgctggcctattaagactccagcgccagcgcgcggtttctgaatttcagcgcctgatacagccaaatcatcagtaccagtcctacacacgccagtgcgccccaggtaatttgatcaaatacttcaatatatgcattgatggagtagttgatcgccccggaagcatcaaagctagcctggcttgtctgatcggcaatcacgcccgccagatagttcgcgatcgcgccagaaagcagcatgtagatgccggttaatacgccggtcacaccggggatttcaatgcgcgtaatttggctcatggcaaccgggtcgataaacagttccgcaaagcccatcaccgccaggcctaataccatcagtggcagagaagagtgaccatacattgcggaccagcgggcgcttaaggtcagaatgcagaatccggcgctcatcaggccaaggccaagagcaaatttcccccagatgcgcacggtacgattacccgcgacactctcttttaccacccacgccaggaacacaccgcacagcataactgcgaaggcattaatgctctggaacatcgcggtcggaacggtataaccaaacatatcgcggttaacgaagcggtcgatataaaggctaatgctgctaccgccctgttgtgcgaaggcccagaacaacatactgaagaaggtgagcgtcacaatcagccccagctccttccgctgtttctggttttctgctttgcgataaatttttgccagtacacccaggccaataatagtcgcgacaattaaggcgtatacgctccactctttccagaacagtatggtaatcagtgcaggcgttgccaccagcagaaccagcagccatccccagttcggcaggagaaagtttgtcgcacgcagtacttttttgttaacgccgcgggtatgagtgaaatgacgattgccacataagaaaatgaccagacccgcgatcatgccaaccgccgccaggccaaagcccatcgcccagctgtactcttcctgggcgtaaccacaggcgataggtgcgataatagaccccacgttacccgccgcatacatcaggctgaaaccgccatcacgacgcggatcggttggctcatacagctcgccgagcagacagcttacgttagatttaaacaggccatagccgcagacgataatcgccagggacagatagaggaaactcggatggatctcactggcacccagcaccacatgaccgatcgccatcaacaacgcccccagcatcaccgccatgcgattgccgagaactttatccgccaaaaagccaccgaggattggcgtgacatacaccaggctacagtaggcgctaaataactcgtaggcgtgagtatcgttgtattttagttgattggtgagatagagaatcagcagggcacgcatgccgtaaaagctaaaatattcccagatttgcagcgcaacgacatagtaaatagcgcgcggctgacttgcgtgtttattcataataattccacaattgacggcaacgtcacgtaatagttgcgcggcgtgcttgtgtttccttaaagttaaaactttgatacagatctgattatttatgcaatatgctgtctgattgcataaatatacattagctgaagcgtgatgatataaacaatttgcgtcttttggcgtcgggtttgtttcttaatatgtcaaaagattggctatcgacgaactggcgaggtaacgctatgttaacggtgtagctatcagaatacggaaggcgcgaagatgaaaaacaccgaactggaacaactgattaacgaaaaactgaacagcgcggcgattagtgattacgcgccgaatggtttgcaggtggaaggcaaagagacggtgcaaaaaattgttaccggtgtcaccgccagccaggctttgctcgatgaggcagtgcgtctgggcgcggatgcggtcattgtgcatcatggctacttctggaaaggagagtctccggtcattcgcggaatgaagcgtaaccgtttaaaaacgttgctggcgaatgatatcaacctgtatggctggcatttgccgcttgacgcacatcctgagctgggcaataacgcacagctggcggcgttactggggatcacggtcatgggcgaaattgagccgttggtgccgtggggcgaactgaccatgcctgtgccgggactggagctggcttcctggattgaagcgcgtctgggacgtaagccgttatggtgtggcgataccggacctgaggtggtccagcgcgtcgcctggtgcacgggcggcgggcaaagttttatcgatagcgccgcgcgttttggcgtggatgcttttattactggcgaagtttctgaacagaccattcatagtgcccgcgagcagggattgcatttttatgctgcaggtcaccatgccactgaacgtggtggtattcgcgcattgagcgagtggctgaatgaaaataccgatcttgatgtgacctttattgatattcctaatcctgcataacgaataatcagagggatcgaaagtgcaacgagcgcgttgttatctgataggtgaaacggcggtagtgctggaactggaaccgccggtgacgctggctagccagaaacggatctggcgactggcgcagcgtctggtggatatgccgaatgtggttgaagccattcccggcatgaacaatatcacggtgattttgcgtaatcctgagagcctggcgctggatgccatagagcgtttgcaacgctggtgggaggagagcgaggcgctggagccggagtctcgctttattgaaattccggtggtttacggtggtgcaggcggaccggatttggcggtggtcgcggcgcattgcgggttgagcgaaaaacaggttgttgaattgcactcctccgtggaatacgtggtctggtttttaggttttcaaccgggcttcccgtatctcgggagtttgccggaacaactacacacgccacggcgcgctgaaccgcgcttactcgttccggcaggttctgtcgggatcggcgggccgcagactggtgtttatccgctggcaacgccgggtggctggcagttgattggtcataccagtctcagcctgtttgatccggcgcgtgacgaacccatcttattacgtccgggagacagcgtgcgctttgtaccgcagaaggagggagtatgctgaagattattcgtgcgggcatgtataccactgtgcaggatggcggtcgtcacggttttcgccagagcggtatcagccactgcggcgcactggatatgcccgcgttacgcattgctaacctactggtgggtaatgacgccaatgcccccgcgctggagatcacgctcggtcagttaactgttgagttcgaaactgatgggtggtttgctctgacgggtgccggttgcgaagcgcggctggatgataatgccgtctggaccggctggcgattgccgatgaaagcaggccagcgtttaacgcttaaacgcccgcagcacgggatgcgcagttatctggcggtcgcgggtggtattgatgttccgccggtaatgggcagttgcagcaccgatctcaaagtggggattggcgggctggaaggccgtttactgaaggatggtgaccgactcccgattggcaaaagcaagcgtgattctatggaagcgcagggcgttaaacagctgctgtggggcaaccgcattcgcgccttgccggggccggaatatcatgagttcgatcgcgccagccaggatgcattctggcgtagcccctggcagcttagcagccaaagtaaccgcatgggctatcgcttacaggggcaaattttaaaacgcaccaccgatcgcgaactgttatctcacggtttgttaccgggcgtggtgcaggtgccacataacgggcagccgattgtgttgatgaacgacgcacagaccaccggtggttacccgcgtattgcctgtatcattgaggctgatatgtaccatctggcgcaaattccgctcggtcagccgattcattttgtccagtgtagtctggaagaggcactaaaagcacggcaagatcagcaacgttattttgaacaattagcgtggcggctgcacaatgaaaattgacctgaacgccgatctgggcgaaggctgcgccagcgacgcagagctattaacgctggtttcctctgccaatattgcctgtggatttcatgcaggcgatgcgcaaatcatgcaggcttgcgtgcgtgaagcaataaaaaatggtgtcgcgattggcgctcacccgagttttcccgacagggaaaattttggtcgcagcgccatgcagctgccgccagaaaccgtttacgcccagacgctgtatcaaattggcgcgctggcaacgattgcccgtgcgcaaggcggcgtaatgcgtcatgtcaaaccgcacggcatgttgtacaaccaggcggcgaaagaagcacaactggcagacgccatcgccagagcggtatacgcttgcgatccagcattgattctcgtcgggctggcgggaagcgagctgattcgtgcaggcaagcaatatggtctgacaacgcgcgaggaagtgtttgccgatcgcggttatcaggctgacggcagcctggtgccgcgaagccagagtggcgcgttgattgaaaacgaagaacaggcgctggcgcaaacgctggagatggtgcaacacggcagagtcaaaagtatcaccggcgaatgggcaacggtcgcggcgcaaacggtctgcctgcatggcgacggcgagcacgcactggcgttcgcccgccgactacgctctgcatttgccgaaaaggggattgttgtcgcagcataaccccgattaataaagaatgaaaaaaggatatcaccatgcctgaaggcccggagatccgccgtgcagcggataacctggaggcggcgatcaaaggcaaaccactaactgatgtctggtttgccttcccgcagttaaaaccttatcaaagtcaacttatcggtcaacacgttacccatgtggaaacgcgtggtaaggcgttgttaactcatttttccaacgacttaacgctctacagccataatcagctttacggcgtctggcgcgtggttgataccggcgaagagccgcagaccacgcgagtattgcgggtaaaactgcaaacggctgacaaaaccattctgctttatagcgccagcgatattgagatgttgaccccggaacaactgaccacgcatccgtttttacaacgcgttggtcccgatgtgctggatccgaatctgacgccggaggtggtgaaagaacgattattgagcccgcgctttcgtaaccgtcagtttgctggattactgctcgatcaggcgtttctggctgggcttggcaattatttgcgggtggagatcctctggcaggttgggttgactggaaatcataaagcgaaagatctcaatgcggcgcaactggatgcactcgcacacgcgttactggagattcctcgattttcctacgctacgcgggggcaggtggatgagaataagcatcatggggcgctgtttcgctttaaggtttttcatcgagatggcgaaccgtgcgaacgttgtggcagcatcattgagaaaaccacgctgagttctcgcccgttttactggtgccctggctgccagcattaagcgctccgcttcggcgcataggtactaataaaccgcgcaatggcaggccctgtcagcaaaatactgaacaggcgtagggtttgcatcgccataatgagcgccatatcggcattgctccctgcggcgatgaccgccacggtatcaagcccgccggggctggtggcgaggtaggcagtcataaaatcaatgtgcataaaccgggtcagcccccacgccatacccgcacaaatagccagcagagcaaaaatgctcagcaggatttgcggtagcgggcgtagtgcccgcagtaagatttgtttatcgaaaccaagaccaatccgccagccaattgccatatacgccatcgccagcagccattccggtagttcgatggtgatgagctgaccagactggagcactgcgcccgccagcatcgggatgagcatcgtgccggaaggaagacgcagcaggcatcccactgtaccggcaacgaccgcgagcaaaatagtaagcaggagattaatgctcactggcgggaaccagacgatatgctggttaaccgcttcagcgttatcgcccagcatcatgcgggtgaccagaacagcggcccccgcgacgaacagcactcgcagatattgcataaacgccaccaggcgaatatctgcgccgtaatcttgcgccatagcgaccattgccgccgcgccgccaggagaggagccccaggcaccggtatttccaggcaaactgctatagcgcaccaataaccaacccacaatggcgctggaaagcagcgttaccagtaaaattgcaagcacgatcggccagttgacggccagggtggtgagaatgctaccagtgaggttttgcgcaatcatgcagccaagaatggcctgggcggcgagaaaagcagagcggggaagttgcagagtaattccgcgcatactaaagatgatcccggcgatcatcggcccaagtaatagcgccgccgggagatgtaccgcgaggaaaccaatagaaaggagaagacttagcacacataacattccccactgcaaaactggcatccttcgctccctcattattttctctttggtgtatcgatacagcataaagaaagctgggccaggaaaaaataacagcaatcaaggaaaaggggaaaatcagcaattttctgaaagagatgccctttccggcggcaaagggcatcatggtaaatcagttatagttaatcttaaaaagcaccactgtatcgaaggggccagcctcgatgggggtgcctggaatggagctaagttcagccgtataggttttttcgtagaccaacatgtcactggtgaaatcggcgtattcagcatatttattgaaggtataagggctggcgttttcatccagtaaacgtagcttcagaccattaccaatcaacaatgctttatcttcttcaaccaacgtttcttcggtataaaaggaggaactgactttaaatccgtcggtgcattgatcgttttggctcttggtcgttttaatactgaacgttttgctcattgtgtggcgacgtatatccagcaaattaaatttaccaaaatcaatcacctgtgtttccggactaatggaaaaattgacgctgcaatccagcacgcgaatgttttccagaccagtaatatgatatttcaggttttgggcagtagggtcttcgttaacgctaccggcaccgtcaaattgcacgacgatatagtcgctaagcgtactttgataatcatgcggcggcatttctcgtattttgacgtataaccgcatgcgagcgagaaaggtacggctcatatgaatattagcgggatcgccgctgcaaattttgttctgccatcccatcgcgatgatctgctcaggggtataaatatcaatgttcttactgtcgatacactggttagtgtcgatgcgactttttcccagactggcatcgtaatcgacaccgttgtatgtcacgccgagttgataataacgatcctgcacccccggataggggtttacccaggcgtagacatgctcgctttcaaagttgccgttggtattgttgtcacaatagacgggaattttaatatcgtcagattcccagatcttatcaccgggtttggcattgcctggtacagcaaacggttgaatcgcttcacttttttctactgcgccaccagatgtaccaaaatagcagttcagcgccattgcagacttcaacggcagaaataacaggcagatgacgagcaacaatcccttgccagcactcatttcgcctccactgcttgtaaacggcattgtccgctgcagttgagcgtcgtcatgcgtaatgcgccgtaatcatccatgtaaccgagataaaactggctgccgctataacttccggtgtttgtgttgaccgtactaaaaggtgcaaccatcacggttttgaagcctgggagaacgcctttttcatttctccccagataggcaatggtcagataatacgcggtaggatttttcagtgtcagttggttgccctgctggctgacctgtaactgcagttcgaccttttctcctgctttcttgcgtaatgcagccggtcgccagaacaatttaatacgactttgaatagcgacctgaagtatcgcatggtcgctgcttttatccggagcgggaggaatttcgcgcatattgtagaaaaatagcgtttcgcgatcgccaggtaattgtgtggtactggcttgtttcacaacccgcacctggcttgtcgctttcggttccagacgttgaatagggggcaaagcgaccagaagagcatcgcttttctcccctttttcattttctatccaggaataagcaagataaggcagtttgtcactttggttttcgatacgcaggctggtggctttgtcattggcgttaaacacaatgcgtgtgcgatcgggttgcaccgcagcattgcaacccaagctgatggttaacaacattaagggtaatcctttaataaatgtcattctcttttccttaattaatgacaaggtaaaatcaggcgtttggtcgtgtcttccagacgttctggcagatgaataatgcagctttgctcaccccagaccacggtaaacagttgattttcagcgacaccgcttaaccaggcatgtccttcctcgccaaccatacccacgctaatgccgctgtcatcctggcggatatccgcaccgaggggagggaactgaccgctggcgttgcgtatgatgacgttaacgtctttaccggaacgggaagccagacttttgtaacctatcgcgccttcaatccatgtttccttgatgacgttttctgcaactgttacgccgtcgggtaagtcattcatgttcaccgccacggtggaaggctggtaactggaaatcaacggcaccaccgcaatgccaaaatggttggtgtagtcgagattgccctgaaccggaatatctgccacgccatcggtgctgaccatcaggcgtggttcattggtggagctgcggcgatgaaatgctgcaccatattgggttgcggtgaaagaaccgctccagctgctgctgacggaactgtaatcactggcggcataggtaccagaaatatcccactcacccgcactactcaggtgctgatagttaccgctcacctgggctccattgtccggacgatcggattgcagtccggcagacatgccccagctattacgttcatccagcgtatcgttccagctcatgcggtgtatggtgctgtggctactgttttgcatgtcatagccaacccgaccaccgttaccgaaggggaggctaatgctcagataaatctggttgtcgcgatctttatcttcgtagtgggtcgtattgaaactcgtgctaatgctgatatctctccagtcaccaatatcaacattaaaacctgctgtgatgttggcggtcgtggaggcgtctgcattccaccaggtttgatgtagcaggttggcgtaaagattgaggtttagtggggtaatcggttggcccacggataagctgatcgtctgtttttcgtcctgcgcatcgctgtcgttgtatttgtgatccagatagttggcgtagctgtgaaaatgacgatcactgaagcgataagcggcgaggctaatcgtgctgttggtggcatccacttgtttgctgtaattaaaacggtagcttaagccccgctcgtcctgctgagtatcaaaatggctactggcccaggtgacatcaaaggacagtgcgccaagccacagcatattttgcccgatacccattgcggcagaatggtagtcatcatcagaaatcagcaggccgccgtacaggctggtgttactgagcatcccccaggaaacttcattgctaaaaaaggtttcattttcagtttgatgactcatggaaggccgtggctgacccgcggccaatttatagcgaacctgtccctggcgagtcaggaagggcgtgcttgctgcgctaacctggaaattgttcacccgaccatcttcttccgtcactttgacatccagcgtgccctgaacagactgattgaggtcatcaataataaacgggcctggcgggacttttttctggtaaatgacgcggccactttgactgatcgtcaccgtggcattggtctgtgcaataccgctaatttgtggggcgtagccacgcagctcccacggtaacattcgatcgtcactcgccagtgccgcgccggtataagaaaaaccatcgaaaatattggaactgaaatcggtttcgccgagggttaacttagagcctaattgcggtaatggacgaaaaagataggtgcggcttattccgccactctggtcatggttatcttcgctatcggtcttattaagctggtaatcactgcgtaagcgccatgccccggcgttaattccggcggtaccgtaggcattcaggttagtgctgctgctgccgtcctgtgggcggtagctgctggcaaacaagttgtaatccatcaggacaccggcaacaccttctttccatgtagaggggggagcccagttttcactgtgccacgccagccaggcttgcggaatactaatattcagttgctgattggcttgatcgaaattgaagagcatttcaggtcgggaactgaaatcaatacaccgatctatctgtggcaaggactgacggacatctggttttaaaccaaatttatcgaccagactatcattgatgcatggaatggttttgtcaccctttttttgccagttaattttttgcccattactgattttgttgttattcaccgcaacgctaacaaaatattcaccgggagcaatgactcctttttcctttaataaactaatatcaatgcggtcgcgcatacttttatcgagaacattcagattgaattcgaccgccattgcgcaaggcatcgccatgaccaggcaggatacaaaagagagtcgataaatattcacggtgtccatacctgataaatattttatgaaaggcggcgatgatgccgccaaaataatacttatttataatccagcacgtaggttgcgttagcggttacttcacctgccgtgacatcgactgcattatcaatttgttccatccaggcgaaaaagttcagcgtctgttcactactgcttgcatccaggtcaagatctggcgcggcactacctaatacgatgttaccgtcatttttgtccatcagtcgtacaccgaccccagttgcttcgcctgcactggtgttgctcaacaaaggcgtagcaccagttgtcttagccgtgctatcgaaggttacgccaactttggataccggcattccgctaccgttgtcagaagcaggcagatcacagttgatcaagcgaatgtcgacggccactttattgctatgatgctcccggtttatatgggttgtcgtgacttgtccaagatctatgtttttatcaatatcttctggatgaatttcacaaggtgcttcaataacctcccccttaaagtgaatttcgccagaaccttcatcagcagcataaacaggtgcagtgaacagcagagatacggccagtgcggccaatgttttttgtcctttaaacataacagagtcctttaaggatatagaataggggtatagctacgccagaatatcgtatttgattattgctagtttttagttttgcttaaaaatattgttagttttattaaatgcaaaactaaattattggtatcatgaatttgttgtatgatgaataaaatataggggggtatagatagacgtcattttcatagggttataaatgcgactaccatgaagtttttaattgaaagtattgggttgctgataatttgagctgttctattctttttaaatatctatataggtctgttaatggattttatttttacaattttttgtgtttaggcatataaaaatcaacccgccatatgaacggcgggttaaaatatttacaacttagcaatcaaccattaacgcttgatatcgcttttaaagtcgcgtttttcatatcctgtatacagctgacgcggacgggcaatcttcataccgtcactgtgcatttcgctccagtgggcgatccagccaacggtacgtgccattgcgaaaatgacggtgaacatggaagacggaatacccatcgctttcaggatgataccagagtagaaatcgacgttcgggtacagtttcttctcgataaagtacgggtcgttcagcgcgatgttttccagctccatagccacttccagcaggtcatccttcgtgcccagctctttcagcacttcatggcaggtttcacgcattacggtggcgcgcgggtcgtaatttttgtacacgcggtgaccgaagcccatcaggcggaaagaatcatttttgtctttcgcacgacgaacaaattccggaatgtgtttaacggagctgatttcttccagcattttcagcgccgcttcgttagcaccgccgtgcgcaggtccccacagactagcaatacctgctgcgatacaggcaaacgggttcgcaccgctagagccagcggtacgcacggtggaggtagaggcgttctgttcatggtcagcgtgcaggatcagaatacggtccatagcacgttccagaatcggattaacttcatacggttcgcacggcgtggagaacatcatattcaggaagttaccggcgtaggagagatcgttgcgcgggtaaacaaatggctgaccaatggaatacttgtaacacatcgcggccatggtcggcattttgctcagcaggcggaacgcggcaatttcacggtgacgaggattgttaacatccaggctgtcgtgatagaacgccgccagcgcgccggtaataccacacatgactgccattggatggctgtcgcgacggaaagcatggaacagacgggtaatctgctcgtggatcatggtatgacgggtcaccgtagttttaaattcgtcatactgttcctgagtcggtttttcaccattcagcaggatgtaacaaacttccaggtagttagaatcggtcgccagctgatcgatcgggaaaccgcggtgcagcaaaataccttcatcaccatcaataaaagtaattttagattcgcaggatgcggtactagtgaagcctgggtcaaaggtgaacacacctttactaccgagagtacggatatcaataacatcttgacccagcgtgcctttcagcacatccagttcaacagctgtatccccgttgagggtgagttttgcttttgtatcagccatttaaggtctccttagcgccttattgcgtaagactgccggaacttaaatttgccttcgcacatcaacctggctttacccgttttttatttggctcgccgctctgtgaaagaggggaaaacctgggtacagagctctgggcgcttgcaggtaaaggatccattgatgacgaataaatggcgaatcaagtacttagcaatccgaattattaaacttgtctaccactaataactgtcccgaatgaattggtcaatacttccacactgttacataagttaatcttaggtgaaataccgacttcataacttttacgcattatatgcttttcctggtaatgtttgtaacaactttgttgaatgattgtcaaattagatgattaaaaattaaataaatgttgttatcgtgacctggatcactgttcaggataaaacccgacaaactatatgtaggttaattgtaatgattttgtgaacagcctatactgccgccaggtctccggaacaccctgcaatcccgagccacccagcgttgtaacgtgtcgttttcgcatctggaagcagtgttttgcatgacgcgcagttatagaaaggacgctgtctgacccgcaagcagaccggaggaaggaaatcccgacgtctccaggtaacagaaagttaacctctgtgcccgtagtccccagggaataataagaacagcatgtgggcgttattcatgataagaaatgtgaaaaaacaaagacctgttaatctggacctacagaccatccggttccccatcacggcgatagcgtccattctccatcgcgtttccggtgtgatcacctttgttgcagtgggcatcctgctgtggcttctgggtaccagcctctcttcccctgaaggtttcgagcaagcttccgcgattatgggcagcttcttcgtcaaatttatcatgtggggcatccttaccgctctggcgtatcacgtcgtcgtaggtattcgccacatgatgatggattttggctatctggaagaaacattcgaagcgggtaaacgctccgccaaaatctcctttgttattactgtcgtgcttagtcttctcgcaggagtcctcgtatggtaagcaacgcctccgcattaggacgcaatggcgtacatgatttcatcctcgttcgcgctaccgctatcgtcctgacgctctacatcatttatatggtcggttttttcgctaccagtggcgagctgacatatgaagtctggatcggtttcttcgcctctgcgttcaccaaagtgttcaccctgctggcgctgttttctatcttgatccatgcctggatcggcatgtggcaggtgttgaccgactacgttaaaccgctggctttgcgcctgatgctgcaactggtgattgtcgttgcactggtggtttacgtgatttatggattcgttgtggtgtggggtgtgtgatgaaattgccagtcagagaatttgatgcagttgtgattggtgccggtggcgcaggtatgcgcgcggcgctgcaaatttcccagagcggccagacctgtgcgctgctctctaaagtcttcccgacccgttcccataccgtttctgcgcaaggcggcattaccgttgcgctgggtaatacccatgaagataactgggaatggcatatgtacgacaccgtgaaagggagcgactatatcggtgaccaggacgcgattgaatatatgtgtaaaaccgggccggaagcgattctggaactcgaacacatgggcctgccgttcagccgtctcgatgatggtcgtatctatcaacgtccgtttggcggtcagagcaaaaacttcggcggcgagcaggcggcacgcactgcggcagcagctgaccgtaccggtcacgcactgttgcacacgctttatcagcagaacctgaaaaaccacaccaccattttctccgagtggtatgcgctggatctggtgaaaaaccaggatggcgcggtggtgggttgtaccgcactgtgcatcgaaaccggtgaagtggtttatttcaaagcccgcgctaccgtgctggcgactggcggagcagggcgtatttatcagtccaccaccaacgcccacattaacaccggcgacggtgtcggcatggctatccgtgccggcgtaccggtgcaggatatggaaatgtggcagttccacccgaccggcattgccggtgcgggcgtactggtcaccgaaggttgccgtggtgaaggcggttatctgctgaacaaacatggcgaacgttttatggagcgttatgcgccgaacgccaaagacctggcgggccgtgacgtggttgcgcgttccatcatgatcgaaatccgtgaaggtcgcggctgtgatggtccgtgggggccacacgcgaaactgaaactcgatcacctgggtaaagaagttctcgaatcccgtctgccgggtatcctggagctttcccgtaccttcgctcacgtcgatccggtgaaagagccgattccggttatcccaacctgtcactacatgatgggcggtattccgaccaaagttaccggtcaggcactgactgtgaatgagaaaggcgaagatgtggttgttccgggactgtttgccgttggtgaaatcgcttgtgtaagcgtacacggcgctaaccgtctgggcggcaacagcctgctggacctggtggtctttggtcgcgcggcaggtctgcatctgcaagagtctatcgccgagcagggcgcactgcgcgatgccagcgagtctgatgttgaagcgtctctggatcgcctgaaccgctggaacaataatcgtaacggtgaagatccggtggcgatccgtaaagcgctgcaagaatgtatgcagcataacttcagcgtcttccgtgaaggtgatgcgatggcgaaagggcttgagcagttgaaagtgatccgcgagcgtctgaaaaatgcccgtctggatgacacttccagcgagttcaacacccagcgcgttgagtgcctggaactggataacctgatggaaacggcgtatgcaacggctgtttctgccaacttccgtaccgaaagccgtggcgcgcatagccgcttcgacttcccggatcgtgatgatgaaaactggctgtgccactccctgtatctgccagagagcgaatccatgacgcgccgaagcgtcaacatggaaccgaaactgcgcccggcattcccgccgaagattcgtacttactaatgcggagacaggaaaatgagactcgagtttagtatttatcgctataacccggatgttgatgatgctccgcgtatgcaggattacaccctggaagcggatgaaggtcgcgacatgatgctgctggatgcgcttatccagctaaaagagaaagatcccagcctgagcttccgccgctcctgccgtgaaggtgtgtgcggttccgacggtctgaacatgaacggcaagaatggtctggcctgtattaccccgattagcgcactcaaccagccgggcaagaagattgtgattcgcccgctgccaggtttaccggtgatccgcgatttggtggtagacatgggacaattctatgcgcaatatgagaaaattaagccttacctgttgaataatggacaaaatccgccagctcgcgagcatttacagatgccagagcagcgcgaaaaactcgacgggctgtatgaatgtattctctgcgcatgttgtagtacctcttgtccgtctttctggtggaatcccgataagtttatcggcccggcaggcttgttagcggcatatcgtttcctgattgatagccgtgataccgagactgacagccgcctcgacggtttgagtgatgcattcagcgtattccgctgtcacagcatcatgaactgcgtcagtgtatgtccgaaggggctgaacccgacgcgcgccatcggccatatcaagagcatgttgttgcaacgtaatgcgtaaaccgtaggcctgataagacgcgcaagcgtcgcatcaggcaaccagtgccggatgcggcgtgaacgccttatccggcctacaagtcattacccgtaggcctgataagcgcagcgcatcaggcgtaacaaagaaatgcaggaaatctttaaaaactgcccctgacactaagacagtttttaaaggttccttcgcgagccactacgtagacaagagctcgcaagtgaaccccggcacgcacatcactgtgcgtggtagtatccacggcgaagtaagcataaaaaagatgcttaagggatcacgatgcagaacagcgctttgaaagcctggttggactcttcttacctctctggcgcaaaccagagctggatagaacagctctatgaagacttcttaaccgatcctgacagcgttgacgctaactggcgtaacacgttccagcagttacctggtacgggagtcaaaccggatcaattccactctcaaacgcgtgaatatttccgccgcctggcgaaagacgctagtcgttactctagtacgatctccgaccctgacaccaatgtgaagcaggttaaagtcctgcagctcattaacgcataccgcttccgtggtcaccagcatgcgaatctcgatccgctgggactgtggcagcaagataaagtggccgatctggatccgtctttccacgatctgaccgaagcagacttccaggagaccttcaacgtcggtagttttgccagcggcaaagaaaccatgaaactcggcgagctgctggaagccctcaagcaaacctactgcggcccgattggtgccgagtatatgcacattaccagcaccgaagaaaaacgctggatccaacagcgtatcgagtctggtcgcgcgactttcaatagcgaagagaaaaaacgcttcttaagcgaactgaccgccgctgaaggtcttgaacgttacctcggcgcaaaattccctggcgcaaaacgcttcagcctggaaggcggtgacgcgttaatcccgatgcttaaagagatgatccgccacgctggcaacagcggcacccgcgaagtggttctcgggatggcgcaccgtggtcgtctgaacgtgctggtgaacgtgctgggtaaaaaaccgcaagacttgttcgacgagttcgccggtaaacataaagaacacctcggcacgggtgacgtgaaataccacatgggcttcagctctgacttccagaccgatggcggcctggtgcacctggcgctggcgtttaacccgtctcaccttgagattgtaagcccggtagttatcggttctgttcgtgcccgtctggacagacttgatgagccgagcagcaacaaagtgctgccaatcaccatccacggtgacgccgcagtgaccgggcagggcgtggttcaggaaaccctgaacatgagcaaagcgcgtggttatgaagttggcggtacggtacgtatcgttatcaacaaccaggttggtttcaccacctctaatccgctggatgcccgttctacgccgtactgtactgatatcggtaagatggttcaggccccgatttttcacgttaacgcggacgatccggaagccgttgcctttgtgacccgtctggcgctcgatttccgtaacacctttaaacgtgatgtcttcatcgacctggtgtgctaccgccgtcacggccacaacgaagccgacgagccgagcgcaacccagccgctgatgtatcagaaaatcaaaaaacatccgacaccgcgcaaaatctacgctgacaagctggagcaggaaaaagtggcgacgctggaagatgccaccgagatggttaacctgtaccgcgatgcgctggatgctggcgattgcgtagtggcagagtggcgtccgatgaacatgcactctttcacctggagcccgtacctcaaccacgaatgggacgaagagtacccgaacaaagttgagatgaagcgcctgcaggagctggcgaaacgcatcagcacggtgccggaagcagttgaaatgcagtctcgcgttgccaagatttatggcgatcgccaggcgatggctgccggtgagaaactgttcgactggggcggtgcggaaaacctcgcttacgccacgctggttgatgaaggcattccggttcgcctgagcggtgaagactccggtcgcggtaccttcttccaccgccacgcggtgatccacaaccagtctaacggttccacttacacgccgctgcaacatatccataacgggcagggcgcgttccgtgtctgggactccgtactgtctgaagaagcagtgctggcgtttgaatatggttatgccaccgcagaaccacgcactctgaccatctgggaagcgcagttcggtgacttcgccaacggtgcgcaggtggttatcgaccagttcatctcctctggcgaacagaaatggggccggatgtgtggtctggtgatgttgctgccgcacggttacgaagggcaggggccggagcactcctccgcgcgtctggaacgttatctgcaactttgtgctgagcaaaacatgcaggtttgcgtaccgtctaccccggcacaggtttaccacatgctgcgtcgtcaggcgctgcgcgggatgcgtcgtccgctggtcgtgatgagcccgaaatccctgctgcgtcatccgctggcggtttccagcctcgaagaactggcgaacggcaccttcctgccagccatcggtgaaatcgacgagcttgatccgaagggcgtgaagcgcgtagtgatgtgttctggtaaggtttattacgacctgctggaacagcgtcgtaagaacaatcaacacgatgtcgccattgtgcgtatcgagcaactctacccgttcccgcataaagcgatgcaggaagtgttgcagcagtttgctcacgtcaaggattttgtctggtgccaggaagagccgctcaaccagggcgcatggtactgcagccagcatcatttccgtgaagtgattccgtttggggcttctctgcgttatgcaggccgcccggcctccgcctctccggcggtagggtatatgtccgttcaccagaaacagcaacaagatctggttaatgacgcgctgaacgtcgaataaataaaggatacacaatgagtagcgtagatattctggtccctgacctgcctgaatccgtagccgatgccaccgtcgcaacctggcataaaaaacccggcgacgcagtcgtacgtgatgaagtgctggtagaaatcgaaactgacaaagtggtactggaagtaccggcaagtgcagacggcattctggatgcggttctggaagatgaaggtacaacggtaacgtctcgtcagatccttggtcgcctgcgtgaaggcaacagcgccggtaaagaaaccagcgccaaatctgaagagaaagcgtccactccggcgcaacgccagcaggcgtctctggaagagcaaaacaacgatgcgttaagcccggcgatccgtcgcctgctggctgaacacaatctcgacgccagcgccattaaaggcaccggtgtgggtggtcgtctgactcgtgaagatgtggaaaaacatctggcgaaagccccggcgaaagagtctgctccggcagcggctgctccggcggcgcaaccggctctggctgcacgtagtgaaaaacgtgtcccgatgactcgcctgcgtaagcgtgtggcagagcgtctgctggaagcgaaaaactccaccgccatgctgaccacgttcaacgaagtcaacatgaagccgattatggatctgcgtaagcagtacggtgaagcgtttgaaaaacgccacggcatccgtctgggctttatgtccttctacgtgaaagcggtggttgaagccctgaaacgttacccggaagtgaacgcttctatcgacggcgatgacgtggtttaccacaactatttcgacgtcagcatggcggtttctacgccgcgcggcctggtgacgccggttctgcgtgatgtcgataccctcggcatggcagacatcgagaagaaaatcaaagagctggcagtcaaaggccgtgacggcaagctgaccgttgaagatctgaccggtggtaacttcaccatcaccaacggtggtgtgttcggttccctgatgtctacgccgatcatcaacccgccgcagagcgcaattctgggtatgcacgctatcaaagatcgtccgatggcggtgaatggtcaggttgagatcctgccgatgatgtacctggcgctgtcctacgatcaccgtctgatcgatggtcgcgaatccgtgggcttcctggtaacgatcaaagagttgctggaagatccgacgcgtctgctgctggacgtgtaatagtttaagtttcacctgcactgtagaccggataaggcattatcgccttctccggcaattgaagcctgatgcgacgctgacgcgtcttatcaggcctacgggaccaccaatgtaggtcggataaggcgcaagcgccgcatccgacaagcgatgcctgatgtgacgtttaacgtgtcttatcaggcctacgggtgaccgacaatgcccggaagcgatacgaaatattcggtctacggtttaaaagataacgattactgaaggatggacagaacacatgaacttacatgaatatcaggcaaaacaactttttgcccgctatggcttaccagcaccggtgggttatgcctgtactactccgcgcgaagcagaagaagccgctagtaaaatcggtgccggtccgtgggtagtgaaatgtcaggttcacgctggtggccgcggtaaagcgggcggtgtgaaagttgtaaacagcaaagaagacatccgtgcttttgcagaaaactggctgggcaagcgtctggtaacgtatcaaacagatgccaatggccaaccggttaaccagattctggttgaagcagcgaccgatatcgctaaagagctgtatctcggtgccgttgttgaccgtagttcccgtcgtgtggtctttatggcctccaccgaaggcggcgtggaaatcgaaaaagtggcggaagaaactccgcacctgatccataaagttgcgcttgatccgctgactggcccgatgccgtatcagggacgcgagctggcgttcaaactgggtctggaaggtaaactggttcagcagttcaccaaaatcttcatgggcctggcgaccattttcctggagcgcgacctggcgttgatcgaaatcaacccgctggtcatcaccaaacagggcgatctgatttgcctcgacggcaaactgggcgctgacggcaacgcactgttccgccagcctgatctgcgcgaaatgcgtgaccagagccaggaagatccgcgtgaagcacaggctgcacagtgggaactgaactacgttgcgctggacggtaacatcggttgtatggttaacggcgcaggtctggcgatgggtacgatggacatcgttaaactgcacggcggcgaaccggctaacttccttgacgttggcggcggcgcaaccaaagaacgtgtaaccgaagcgttcaaaatcatcctctctgacgacaaagtgaaagccgttctggttaacatcttcggcggtatcgttcgttgcgacctgatcgctgacggtatcatcggcgcggtagcagaagtgggtgttaacgtaccggtcgtggtacgtctggaaggtaacaacgccgaactcggcgcgaagaaactggctgacagcggcctgaatattattgcagcaaaaggtctgacggatgcagctcagcaggttgttgccgcagtggaggggaaataatgtccattttaatcgataaaaacaccaaggttatctgccagggctttaccggtagccaggggactttccacagtgaacaggccattgcatacggcactaaaatggttggcggcgtaaccccaggtaaaggcggcaccacccacctcggcctgccggtgttcaacaccgtgcgtgaagccgttgctgccactggcgctaccgcttctgttatctacgtaccagcaccgttctgcaaagactccattctggaagccatcgacgcaggcatcaaactgattatcaccatcactgaaggcatcccgacgctggatatgctgaccgtgaaagtgaagctggatgaagcaggcgttcgtatgatcggcccgaactgcccaggcgttatcactccgggtgaatgcaaaatcggtatccagcctggtcacattcacaaaccgggtaaagtgggtatcgtttcccgttccggtacactgacctatgaagcggttaaacagaccacggattacggtttcggtcagagcacctgtgtcggtatcggcggtgacccgatcccgggctctaactttatcgacattctcgaaatgttcgaaaaagatccgcagaccgaagcgatcgtgatgatcggtgagatcggcggtagcgctgaagaagaagcagctgcgtacatcaaagagcacgttaccaagccagttgtgggttacatcgctggtgtgactgcgccgaaaggcaaacgtatgggccacgcgggtgccatcattgccggtgggaaagggactgcggatgagaaattcgctgctctggaagccgcaggcgtgaaaaccgttcgcagcctggcggatatcggtgaagcactgaaaactgttctgaaataaatatctgtaataagaaatagccctcgccgcttccctctacaggaatggcgaagggctgtcggtttcgacatggttggccatcgtatgatggccttttttgtgcttatcggctactttttcgctgcgctatcagggtaaatttatagtcatcggtattaaaagcgttgcggctatattcaaacacccgaccatcaactaaatatccacggcttactttttcaagaatcggctttgtctggctgatattaagcagacggctcatctcttcggttggcatcagaggaatgatttcctgttcgctacgatcgataaccattttcttcacttcttcgataaagtgatatttgctattttccatgacctgccaggtgagatccgggaacaacgcaagcggcatccaggtttcttccagcgccattggcttttgcttgcgatagcgcacgcgcttcacatgccacacacgatcctgcggggtgatttgtagctgttgctgaagaaaatcgtcagccggaatcacttcgaatatcagaacttcactgtgtgtatcgacgtgacggtcgctcagtttttcatcaaaactggttaactgaaaaatatcgtaattgacccgctcttctttgacgtaagtcccgctgccctgaatgctttcgaggatctgctgctcgactagctggcgcaaagcctgacgcaccgtaacccggctgacgccaaactctgtttgtagcgcactttcagtgggtaacgcatcgccaggtttaagctcgccacgcgcaatttgttcacgaatgcgatcggcaatctgccggtataagggcttgtgtcccatttttagtatctcattaatacgaatttaaccattatgcccgataaattcatcctgtaaataatacaaatacaatacaaataatttcaatcaagtgaaattgatcacataatggtattgttttatcgggcacactggcgcgactataaaaacgatcaagtgaggatcatgatgaatctgacgactctgacccaccgcgatgcgttgtgtctgaatgcgcgctttaccagccgtgaagaggccatccacgcgttgactcaacgtcttgctgctctggggaaaatttccagtactgagcaatttctggaagaagtgtatcgccgtgaaagccttggcccgaccgccttaggtgaagggttggctgtgccgcatggcaaaactgctgcggtaaaagaagcggcgtttgcggtcgccacactcagcgagccgcttcagtgggaaggcgttgatggcccggaagcagttgatttagtggtgctgctggcgattccccccaatgaagcgggtactacgcatatgcaactgctgacagcgctgaccacgcgccttgcggatgatgagattcgggcgcgtatacagagcgcgacgacgcctgatgagttgctcagcgcgctggatgacaagggaggcacgcaaccttctgcctctttttccaacgcgccaactatcgtctgcgtaacggcctgtccggcgggtattgctcacacctatatggctgcggaatatctggaaaaagccggacgcaaactcggcgtaaatgtttacgttgaaaaacaaggcgctaacggcattgaagggcgtttaacggcggatcaactcaatagtgcaaccgcctgtatttttgcggctgaagtcgccatcaaggagagtgagcgttttaatggcattcccgcgcttagtgtgcctgttgccgagccgattcgccatgcagaagcgttgatccaacaagcgcttaccctcaagcgtagcgatgagacgcgtaccgtacagcaagatacgcaaccggtgaaaagtgtcaaaacggagctgaaacaggcactgttgagcggaatctcttttgccgtaccgttgattgtcgcggggggcacggtgctggcggtcgcggtattactgagccaaatcttcgggctacaagatctgtttaatgaagaaaactcctggctgtggatgtaccgcaagctgggcggcgggctgctcggaattttgatggtaccggtgctcgcggcctataccgcctattctctggcagataaaccggcgttagcgccaggctttgcggctggacttgccgccaacatgatcggctccgggtttctcggcgcggtcgttggcggattgatagccggttacttgatgcgctgggtgaaaaatcacttgcgtcttagcagtaaattcaatggattcctgactttttatctctacccggtgctcggtacgttgggagcgggcagtctgatgctgtttgtggtgggggaacctgtcgcctggatcaataacagccttaccgcctggctgaacggtctgagtggaagtaacgcgctgttgctgggtgccattctcggttttatgtgttcctttgaccttggagggccagtgaataaagccgcttatgcattctgcctgggcgcaatggcgaacggcgtttacggcccgtatgccattttcgcctccgtcaaaatggttagcgcatttaccgtaaccgcttccacgatgctcgcaccgcgcctgtttaaagagtttgaaattgagaccgggaaatccacctggctgttagggctggcaggtattaccgaaggggcgatcccgatggcgattgaagatccgctgcgggttattggtagctttgtgctgggctctatggtaacgggcgctattgtcggtgcgatgaatatcggccttagcacacccggtgccggcattttcagcctctttttacttcatgataatggcgcgggcggtgttatggcggcaattggctggtttggcgcggcattggtgggggctgcaatcagcactgcaattctcctgatgtggcggcgtcacgcggttaagcatggcaactatctgactgatggcgtaatgccataaacaaaaaggaaacgacgatgaaagcagtatctcgcgttcacatcaccccgcatatgcactgggatcgagagtggtatttcaccaccgaagagagtcgtattctgctggtcaataatatggaagagatcctgtgccgactggaacaggacaacgaatacaaatattacgtactcgacgggcaaacggcgatcctcgaagattatttcgcggtgaaaccggaaaacaaagaccgtgtgaagaaacaggtagaagccggcaagttgattatcggcccctggtatacccagaccgataccacgattgtttctgcggaatccatcgtccgtaatctgatgtacggaatgcgtgactgcctcgcgtttggcgagccgatgaaaataggttatttaccagattcctttggcatgtccgggcaactgccgcatatctacaatggatttggcattacccgcaccatgttctggcgcggatgtagcgagcgccacggtactgataaaaccgagtttttgtggcaaagcagtgacggtagcgaagtgacggcgcaggtgctgccgctgggctacgccatcggtaagtacttacctgccgacgaaaacggattacgtaaacgcctcgacagttattttgacgtgctggaaaaagcgtctgtaaccaaagagattttgctgccgaatgggcatgaccagatgccattgcagcaaaatatcttcgaagtgatggataagctacgtgagatctaccctcaacgtaagtttgtgatgagccgctttgaagaggtatttgagaagatcgaagcgcagcgagataatctggcaaccctgaaaggggaatttattgatggcaaatatatgcgcgtgcatcgcaccatcggttctacgcgtatggatatcaaaattgcccacgcgcgtattgaaaataagattgttaatctgctggaaccgctggcaacactggcctggacgttgggttttgaataccaccacggcttgctggagaaaatgtggaaagagatcttaaaaaatcatgcccacgacagtatcggctgctgctgtagtgacaaagttcatcgcgaaatcgtcgcccgcttcgaactggctgaagacatggcggataatctgattcgtttctacatgcgcaaaattgccgacaacatgccgcagagcgacgccgacaaactcgtcctgtttaacctgatgccctggccgcgtgaagaagttatcaacaccactgtgcggctgcgcgccagccagtttaatttgcgggacgatcgcggtcagcctgtaccgtattttattcgccatgcccgtgagatcgatccaggcctaatcgatcggcaaatagttcattacggtaattacgatccctttatggagtttgatatacagatcaaccagattgtcccttctatgggctatcgcacgctttatatcgaagcgaatcagcctggcaacgtaattgcggcaaaaagtgacgctgaagggatactggaaaatgctttctggcaaattgcgctcaatgaggatggttctctgcaactggtagataaagacagcggtgtgcgctatgaccgggtattgcaaattgaagaaagctctgatgatggtgatgaatatgactatagtcccgcaaaagaagagtgggtaattaccgcagcgaacgcgaaaccgcaatgcgatattattcatgaagcctggcagagcagggctgttatccgctatgacatggcagtgccgctcaatttgagtgaacgcagcgcccggcaatccactggcagagtaggggtggtgttggttgtcactcttagtcataacagcaggcgtattgatgtggatatcaatcttgataaccaggctgacgatcatcgccttcgtgtcctggtccctacaccttttaacaccgacagtgttctggcagatacgcagtttggtagcctaacgcgccccgtgaacgacagtgcaatgaacaactggcagcaagaaggctggaaagaagcgccggttccggtatggaatatgctcaactatgttgccttacaggaagggcgtaacggcatggctgtctttagcgaagggttacgtgaatttgaagtcatcggtgaagagaagaaaacctttgccattacgttgctgcgtggcgtgggcttactgggcaaagaagatctgcttttaaggcctgggcggcctagcggaattaaaatgccagtcccggacagtcaactacgtggtctgctttcttgtcgcctaagtttattgagttataccggtacgccaaccgccgctggtgtagctcagcaggcgcgagcatggctgactccagtacagtgttacaacaaaatcccatgggatgtgatgaagctcaacaaagccggattcaacgtgccggaaagttatagtttgttgaaaatgcccccagtgggatgcctgataagcgcacttaagaaagctgaagaccgacaagaagtgattttacggctgtttaatccggctgaaagtgcaacctgtgatgcgactgttgctttcagtcgcgaggtgatttcttgcagtgaaacgatgatggatgaacacattaccaccgaggaaaatcaaggtagtaatctaagcgggccttttttacccggccagagtcggacgttcagttaccggcttgcctgaatagcaatcaaaccgaagccacatatgcgcggccagattgttgacaaagggcgctttgttcatgccggatacggcatgaacgctttattcggtctacaaaagcaggcaaattcaatatattgcagagatgatgtagacactggcaagcgtagcgcatcaggtaattttgcgtttatcttcactctcaagccacgtatatgtggctttatttttaacaaaataataaccctgggtgagttaattataatataattataagttaactaaatgttaatattggcggggtggatttatgcctttattagtaatcctgaaactctgcgtcgtattagccagtgaccaaaaaaagaattaaggtcaaccgtgctgtttttgcttcgtctctttttatctttaattgccaaccgaaactaatttcagccttataactcacacattttaaacataaatgtcactaaagttaccttattgaaacatgattaacataatttgtaggaattgatatttatcaatgtataagtcttggaaatgggcatcaaaaagagataaattgttctcgatcaaattggctgaaaggcggtaatttagctataaattgatcaccgtcgaaaaatgcaaatttgcttcaacaaaaacctgtttattgtaaggattttgcggcgtaatatatacgtgggatcaatttgagtttttattaacatgtttgcaacctttctttacgccgtttttgtgtgcattcacatggtatgatgaaagtgttcaaacaaatttctattggggcatgcgtgtgaccctttctaacggggttcactctcggagtcttcatgcgatgagcaaggagtcatgatgttagatatagtcgaactgagccgcttacagtttgccttgaccgcgatgtaccacttcctttttgtgccactgacgctcggtatggcgttcctgctggccattatggaaacggtctacgtcctctccggcaaacagatttataaagatatgaccaagttctggggcaagttgtttggtatcaacttcgctctgggtgtggctaccggtctgaccatggagttccagttcgggactaactggtcttactattcccactatgtaggggatatcttcggtgcgccgctggcaatcgaaggtctgatggccttcttcctcgaatccacctttgtaggtctgttcttcttcggttgggatcgtctgggtaaagttcagcatatgtgtgtcacctggctggtggcgctcggtagtaacctgtccgcactgtggattctggttgcgaacggctggatgcaaaacccaatcgcgtccgatttcaactttgaaactatgcgtatggagatggtgagcttctccgagctggtgcttaacccggttgctcaggtgaaattcgttcacactgtagcgtctggttatgtgactggcgcgatgttcatcctcggtatcagcgcatggtatatgctgaaaggtcgtgacttcgccttcgctaaacgctcctttgctatcgctgccagcttcggtatggctgctgttctgtctgttattgttctgggtgatgaatccggctacgaaatgggcgacgtgcagaaaaccaaactggctgctattgaagccgagtgggaaacgcaacctgcgcctgctgcctttactctgttcggcattcctgatcaggaagaggagacgaacaaatttgcgattcagatcccttacgcactgggcatcattgcaacgcgttccgtggataccccggttatcggcctgaaagagctgatggtgcagcatgaagaacgcattcgtaacgggatgaaggcgtactctctgctcgaacaactgcgttctggttctaccgaccaggcggttcgtgaccagttcaatagcatgaagaaagacctcggttacggtctgctgctgaaacgctatacgccaaacgtggctgatgcgactgaagcgcagattcaacaggcaaccaaagactccatcccgcgtgtagcgccgctgtactttgcgttccgtatcatggtggcgtgtggcttcctgcttctggcaatcatcgcgctctctttctggagtgtcatccgcaaccgcattggcgagaaaaaatggcttctgcgcgccgcgctgtacggtattccgctgccgtggattgctgtagaagcgggctggttcgtggctgaatatggccgccaaccgtgggctatcggtgaagtgctgccgacagctgtggcgaacagcagtctgaccgcaggcgatctcatcttcagtatggtgctgatttgcggcctgtataccctgttcctggtggcagaattgttcttaatgttcaagtttgcacgcctcggcccaagcagcctgaaaaccggtcgctatcactttgagcagtcttccacgactactcagccggcacgctaagacaggagtcgtcaaatgatcgattatgaagtattgcgttttatctggtggctgctggttggcgttctgctgattggttttgcagtcactgacggtttcgacatgggggtgggcatgctcacccgtttcctcggtcgtaacgacaccgagcgtcgaattatgattaactccattgcaccacactgggacggtaaccaggtttggctgatcaccgcgggcggcgcactctttgctgcctggccgatggtctatgccgctgcgttctccggcttctatgtggcgatgatcctcgtgctggcgtctttgttcttccgtccggtcggttttgactaccgctccaagattgaagaaacccgctggcgtaacatgtgggactggggcatcttcattggtagcttcgttccgccgctggtaattggtgtagcgttcggtaacctgttgcagggcgtaccgttcaacgttgatgaatatctgcgtctgtactacaccggtaacttcttccagttgcttaacccgttcggcctgctggcaggcgtggtgagcgtagggatgatcattactcagggcgcaacctatctgcaaatgcgtaccgtgggcgaactgcacctgcgtacccgtgcaacggctcaggtggctgcgctggtgacactggtctgtttcgcactggctggcgtatgggtgatgtacggtatcgatggttatgtcgtgaaaagcacaatggaccattacgcagcctctaacccactgaataaagaagtggttcgtgaagctggcgcatggctggttaacttcaacaacacgccaattctgtgggctattccggcactgggtgtggttctgccgctgctgaccatcctgactgcacgtatggataaagccgcgtgggcgtttgtgttctcctccctgacgctggcctgcatcatcctgacagccggtatcgcaatgttcccgtttgtgatgccgtccagcaccatgatgaacgcaagtctgacaatgtgggatgcaacttccagccagctgacgcttaacgtcatgacctgggttgcggtggttctggtaccgatcattctgctctacaccgcctggtgttactggaaaatgttcggtcgtatcaccaaagaagatattgaacgtaacacccactctctgtactaagtaaggagctaaaaatgtggtatttcgcatggattctgggaacgcttcttgcctgtagctttggggtaatcaccgcgctggcgcttgaacacgtcgaaagtggcaaagccggtcaagaagacatctgatgagtaagattatcgcgactttgtatgcggtaatggacaagcgccccctgcgggcgctttccttcgtgatggcgcttctgttagcaggatgtatgttttgggacccatctcgttttgccgcgaagaccagtgaactggaaatctggcatggtttattgctgatgtgggccgtctgtgctggtgtgattcacggcgtgggctttcgtccgcagaaggttctttggcaagggattttttgcccattgcttgccgatattgttctcattgtcgggctgattttcttcttcttttaaatcagaattctctttaaaaaattatgggccgctccaggcccataaatttttacgctcccttaacttgccctcattcccaaacctcaatcgcgcgcgtatagtagcagcgtttaaaagctctaacttttgttgcattaccgggatgtaaagtgaatacaacgctgtttcgatggccggttcgcgtctactatgaagataccgatgccggtggtgtggtgtaccacgccagttacgtcgctttttatgaaagagcacgcacagagatgctgcgtcatcatcacttcagtcagcaggcgctgatggctgaacgcgttgcctttgtggtacgtaaaatgacggtggaatattacgcacctgcgcggctcgacgatatgctcgaaatacagactgaaataacaagtatgcgtggcacctctttggttttcacgcaacgtattgtcaacgccgagaatactttgctgaatgaagcagaggttctggttgtttgcgttgacccactcaaaatgaagcctcgtgcgcttcccaagtctattgtcgcggagtttaagcagtgactgacatgaatatccttgatttgttcctgaaggctagccttctggttaaacttatcatgttgattttgattggttttagtatcgcatcttgggccattattatccagcggacccgtattcttaacgcagcggcgcgcgaagccgaagcgtttgaagataaattctggtctggaatcgaactctctcgcctctatcaagagagccaggggaaacgggataatctgactggtagcgaacaaatcttttacagcgggttcaaagagtttgtgcgcctgcatcgtgccaatagccatgcgccggaagccgtagtggaaggggcgagccgtgctatgcgtatctccatgaaccgtgaacttgaaaatctggaaacgcacattccgttcctcggtacggttggctccatcagcccgtatattggtctgtttggtacggtctgggggatcatgcacgcctttatcgccctcggggcggtaaaacaagcaacactgcaaatggttgcgcccggtatcgcagaagcgttgattgcgactgcaattggtctgtttgccgctatcccggcagttatggcctacaaccgcctcaaccagcgcgtaaacaaactggaactgaattacgacaactttatggaagagtttaccgcgattctgcaccgccaggcgtttaccgttagcgagagcaacaaggggtaagccatggccagagcgcgtggacgaggtcgtcgcgatctcaagtccgaaatcaacattgtaccgttgctggacgtactgctggtgctgttgctgatctttatggcgacagcgcccatcatcacccagagcgtggaggtcgatctgccagacgctactgaaagtcaggcggtgagcagtaacgataatccgccagtgattgttgaagtgtctggtattggtcagtacaccgtggtggttgagaaagatcgcctggagcgtttaccaccagagcaggtggtggcggaagtgtccagccgtttcaaggccaacccgaaaacggtctttctgatcggtggcgcaaaagatgtgccttacgatgaaataattaaagcactgaacttgttacatagtgcgggtgtgaaaagcgttggtttaatgacgcagcctatctaaacatctgcgtttcccttgcttgaaagagagcgggtaacaggcgaacagtttttggaaaccgagagtgagtaaggcaaccgaacaaaacgacaagctcaagcgggcgataattattagtgcagtgctgcatgtcatcttatttgcggcgctgatctggagtagcttcgatgagaatatagaagctagtgccggaggcggcggtggtagctccatcgacgctgtcttggttgatagtggtgcggtagttgagcagtacaaacgcatgcaaagccaggaaagtagcgcgaagcgttctgatgaacagcgcaagatgaaggaacagcaggctgctgaagaactgcgtgagaaacaagcggctgaacaggaacgcctgaagcaacttgagaaagagcggttagcggctcaggagcagaaaaagcaggctgaagaagccgcaaaacaggccgagttaaagcagaagcaagctgaagaggcggcagcgaaagcggcggcagatgctaaagcgaaggccgaagcagatgctaaagctgcggaagaagcagcgaagaaagcggctgcagacgcaaagaaaaaagcagaagcagaagccgccaaagccgcagccgaagcgcagaaaaaagccgaggcagccgctgcggcactgaagaagaaagcggaagcggcagaagcagctgcagctgaagcaagaaagaaagcggcaactgaagctgctgaaaaagccaaagcagaagctgagaagaaagcggctgctgaaaaggctgcagctgataagaaagcggcagcagagaaagctgcagccgacaaaaaagcagcagaaaaagcggctgctgaaaaggcagcagctgataagaaagcagcggcagaaaaagccgccgcagacaaaaaagcggcagcggcaaaagctgcagctgaaaaagccgctgcagcaaaagcggccgcagaggcagatgatattttcggtgagctaagctctggtaagaatgcaccgaaaacggggggaggggcgaaagggaacaatgctagccctgccgggagtggtaatactaaaaacaatggcgcaagtggggccgatatcaataactatgccgggcagattaaatctgctatcgaaagtaagttctatgacgcaagctcctatgcaggcaaaacctgtacgctgcgcataaaactggcacccgatggtatgttactggatatcaaacctgaaggtggcgatcccgcactttgtcaggctgcgttggcagcagctaaacttgcgaagatcccgaaaccaccaagccaggcagtatatgaagtgttcaaaaacgcgccattggacttcaaaccgtaatcgcgatgttgactgttcggacggtcaacatcaggcaccggttgccacggggttctggtagttttgtgtattttagtttgttaacattctgctaaattatcgtgggccatcggtccagataagggagatatgatgaagcaggcattacgagtagcatttggttttctcatactgtgggcaagtgttctgcatgctgaagtccgcattgtgatcgacagcggtgtagattccggtcgtcctattggtgttgttcctttccagtgggcggggcctggtgcggcacctgaagatattggcggcatcgttgctgctgacttgcgtaacagcggtaaatttaatccgttagatcgcgctcgtctgccacagcagccgggtagtgcgcaggaagtacaaccagctgcatggtccgcactgggcattgacgctgtagttgtcggtcaggtcactccgaatccggatggttcttacaatgttgcttatcaacttgttgacactggcggcgcaccgggtactgtacttgctcagaacagctacaaagtgaacaagcagtggctgcgttatgctggtcataccgccagtgatgaagtgtttgaaaaactgaccggcattaaaggtgcgttccgtactcgtattgcctacgttgttcagaccaacggcggtcagttcccgtatgaactgcgcgtatctgactatgacggttacaaccagtttgtcgttcaccgtagtccgcagccgctgatgtctccggcgtggagtccagacggttctaaactggcttatgtgaccttcgaaagcggtcgttccacgctggttattcagacgctggcaaatggcgctgtacgtcaggtggctagtttcccgcgtcacaacggtgcacctgcattcagcccagacggcagcaaactggcattcgccttgagcaaaaccggtagtctgaacctgtacgtaatggatttggcttctggtcagatccgccaggtgactgatggtcgcagtaacaataccgaaccgacctggttcccggatagccagaacctggcatttacttctgaccaggccggtcgtccgcaggtttataaagtgaatatcaacggcggtgcgccacaacgtattacctgggaaggtagccagaaccaggatgcggatgtcagcagcgacggtaaatttatggtaatggtcagctccaatggtgggcagcagcacattgccaaacaagatctggcaacgggaggcgtacaagttctgagctccacgttcctggatgaaacgccaagtctggcacctaacggcactatggtaatctacagctcttctcaggggatgggatccgtgctgaatttggtttctacagatgggcgtttcaaagcgcgtcttccggcaactgatggacaggtcaaattccctgcctggagcccgtatctgtgataataattaattgaatagtaaaggaatcattgaaatgcaactgaacaaagtgctgaaagggctgatgattgctctgcctgttatggcaattgcggcatgttcttccaacaagaacgccagcaatgacggcagcgaaggcatgctgggtgccggcactggtatggatgcgaacggcggcaacggcaacatgtcttccgaagagcaggctcgtctgcaaatgcaacagctgcagcagaacaacatcgtttacttcgatctggacaagtacgatatccgttctgacttcgctcaaatgctggatgcacatgcaaacttcctgcgtagcaacccgtcttacaaagtcaccgtagaaggtcacgcggacgaacgtggtactccggaatacaacatctccctgggtgaacgtcgtgcgaacgccgttaagatgtacctgcagggtaaaggcgtttctgcagaccagatctccatcgtttcttacggtaaagaaaaacctgcagtactgggtcatgacgaagcggcatactccaaaaaccgtcgtgcggtactggtttactaagagaattgcatgagcagtaacttcagacatcaactattgagtctgagcttactggttggtatagcggccccctgggccgcttttgctcaggcaccaatcagtagtgtcggcagtggcagcgtcgaagaccgcgtcactcaacttgagcgtatttctaatgctcacagccagcttttaacccaactccagcaacaactttctgataatcaatccgatattgattccctgcgtggtcagattcaggaaaatcagtatcaactgaatcaggtcgtggagcggcaaaagcagatcctgttgcagatcgacagcctcagcagcggtggtgcagcggcgcaaagtaccagcggcgatcaaagcggtgcggcggcaagtacgacgccgacagctgatgctggtactgcgaatgctggcgcgccggtgaaaagcggtaatgcaaacacggattacaatgcagctattgcgctggtgcaggataaatcccgccaggatgacgcaatggtggcatttcagaatttcatcaaaaattaccctgatagtacttacctgccaaacgccaattattggctgggtcagttaaactacaacaagggtaaaaaagatgatgcggcgtactattttgctagcgtagtgaaaaactatccgaagagtccaaaggctgcagatgcgatgtttaaagtcggcgtcatcatgcaggacaaaggtgacaccgcaaaagcgaaagccgtataccagcaggttatcagtaaataccctggtactgatggcgctaaacaggcacaaaaacgtctgaacgcgatgtaatgcataacacacgaccagaagtcgcattatttctggtcgtgtcgtgcgaatcataagcagttgagtgatctacatcgaaatttttgttgcgctcaagtctgaaatcagtaatatatgccgccgttgccacgggatatcaaacaaaccgaaagcaacgaaaaagtgggtcgttagctcagttggtagagcagttgacttttaatcaattggtcgcaggttcgaatcctgcacgacccaccaatcgctaaggtggaagcggtagtaaaacgtgaaggataacgttgcatgagcaacggcccgaagggcgagacgaagtcgagtcatcctgcacgacccaccactaacatagttagttgtagtatccagcgtagtatcgggtgattagctcagctgggagagcacctcccttacaaggagggggtcggcggttcgatcccgtcatcacccaccaccgggtcgttagctcagttggtagagcagttgacttttaatcaattggtcgcaggttcgaatcctgcacgacccaccagttttaacatcgaagacagatgttaagcgtgtaggataacgttgcgtcagcaacggcccgtagggcgagcgaagcgagtcatcctgcacgacccaccactaatgacggtgggttcggtggaagtagtttgtagtatccagcgcagtatcgggtgattagctcagctgggagagcacctcccttacaaggagggggtcggcggttcgatcccgtcatcacccaccactcgggtcgttagctcagttggtagagcagttgacttttaatcaattggtcgcaggttcgaatcctgcacgacccaccagttttaacatcaaactcagatgttaagcgtgaaggataacgttgcgccagcaacggcccgtagggcgagcgaagcgagtcatcctgcacgacccaccaatcttaaagattggccccgagtaaaaatctttcaggtaacacccgtatgggtcgttagctcagttggtagagcagttgacttttaatcaattggtcgcaggttcgaatcctgcacgacccaccaatttaaaggtggttactggtagagaacgtgaaggataacgttgcgttagcaacggcccgaagggcgagacgaagtcgagtcatcctgcacgacccaccatcctgaatgattaaggcagcataatcccgcaaggggtcgttagctcagttggtagagcagttgacttttaatcaattggtcgcaggttcgaatcctgcacgacccaccaatgtaaaaaagcgccctaaaggcgcttttttgctatctgcgatactcaaagattcgaacctgcagcaggtttgagttgagcgcagcgaaacaacggagccgctcgcggcgacggcccgaagggcgagcgaagcgagtcatcctgcacgacccaccaatgtaaaaaagcgccctaaaggcgcttttttgctattcaggcatcctcaatttcactttgtaaacctgatgacatcgtcagagcttactgtgcaagcaactctatgtcggtggaattaggcgtaaaatgacgcatcctgcacattaggcgtaattcgagtgacttttccccaccattcgactatcttgtttagcatataaaacaaattacaccgataacagcgaatattacgctaatgtcggttttaacgttaagcctgtaaaacgagatggtaagatgagcgtaatgtttgatccagacacggcgatttatcctttccccccgaagccgacgccgttaagcattgatgaaaaagcgtattaccgcgagaagataaaacgtctgctaaaagaacgtaatgcggtgatggttgcccactactataccgatcccgaaattcaacaactggcagaagaaaccggtggctgtatttctgattctctggaaatggcgcgcttcggtgcaaagcatcccgcttctactttgttagtcgctggggtgagatttatgggagaaaccgccaaaattctcagtccggaaaaaacaattctgatgccgacacttcaggctgaatgtagtctggatctcgactgccctgttgaagaatttaacgcattttgcgatgcccatcccgatcgtactgtcgtcgtctacgccaacacttctgctgcggtaaaagcgcgcgcagattgggtggtaactagtagcattgccgtcgaacttattgatcatcttgatagtttgggtgaaaaaatcatctgggcacccgacaaacatctggggcgttacgtgcaaaaacagacgggtggagacattctatgctggcagggtgcctgtattgtgcatgatgaatttaagactcaggcgttaacccgcttgcaagaagaatacccggatgctgccatactggtgcatccagaaagtccacaagctattgtcgatatggcggatgcggtcggttccaccagtcaactgatcgctgctgcgaaaacattgccacatcagaggcttattgtggcaaccgatcggggtattttctacaaaatgcagcaggcggtgccagataaagagttactggaagcaccaaccgcaggtgagggtgcaacctgccgcagctgcgcgcattgtccgtggatggccatgaatggccttcaggccatcgcagaggcattagaacaggaaggaagcaatcacgaggttcatgttgatgaaaggctgcgagagagggcgctggtgccgctcaatcgtatgctggattttgcggctacactacgtggataacgaataataaggcgtaacgttacgctttgggggaaagatggatttttttagtgtgcagaatatcctggtacatataccaataggggcaggcggttatgatctcagttggatcgaagcggtaggcacgatcgccgggttgctgtgtattggccttgccagtctggagaagatcagcaactacttctttggcctgatcaacgtcaccttgtttggcattattttctttcagattcagctgtatgccagcctgctattacaggtgtttttctttgccgcgaatatttacggttggtatgcgtggagccgacaaaccagtcagaacgaggcggagttgaaaattcgctggttgccattgccgaaggcactcagctggttggcggtttgcgttgttagcattggtctgatgacggtatttatcaatccggtgtttgcatttttgacccgcgtggcagtcatgatcatgcaagcattaggattacaggttgtgatgcctgaactgcaaccggacgctttcccgttctgggatagttgcatgatggtgttatctatcgtggcaatgattctgatgacgcgtaagtatgtggaaaactggctgttgtgggtgattattaacgtgattagcgtcgttatttttgcacttcagggcgtttacgccatgtctctggagtacatcatcctgacctttattgcgctcaacggcagccggatgtggatcaacagcgcacgtgaaagaggcagtcgcgcgctgtcccattaatggtgatgatgactatggccagacaccccttcattcaggtggcagtctggcccatgacaaggttgatattccatctgaatggtggcgtgctcaatctgatagtgatccatcaggtagtgttggatctgatccaacaaggcatcgtgatcgtgtggcgggatcacctgcacatgcaacgtcatcaccggcttctcgcctaccatccatacatgtacatggtgcacattgcggacttccgggatttcccggcacatacgacgcttcagttcagcgatatccaggcttaccggtgcaccttcaagtaattcattcacgctatctttcaacagtcgccacgcgctacgcagaaccagaaggctcaccagtatgctgagaatggggtcagcaggtgtccagccagtccagataataatcaacgcggcaataatagccccaacgctacccagcaggtccccgagcacatgcagtgccgctgctcgtacgttgaggtttttctcttcgctgccgtgatgaagtaaccagaaagaaagtatatttgccagcaacccagccacggcaattgccatcatcatgccgccctcgaccggacgcggcgtgcggaagcgttctatcgcctcccagacaatcaaaatggtaattaccacgagggctatggcattcacaaacgccgcgagcgtggtcagtcttagccaaccgaaagtgtggcgaatggtgggaggacgacgactaaattgcacggcgagtagggcgaaaagcagggcggcagtatcggtcaacatatgacccgcatcggccagcaatgccagagaaccagaaagaaaaccaccaacgacttctaccagcataaacccggcagtcacgccgaaagcatacaacaagcgacgagcattattatcttctggcaggtgactggacgtgtgactgtgactgtgcgccatgacgagtcatcccttaattattctcacttaactttatgacatcatactgcttttagaagtgaaaaattaaaagggagagactccgctctcccattattggctattttgcagggttactgcgtggtaccgtcggttttggtatcgacatcattattgatgccatcaccggtttgtacctttttattgatatccggacagcgaccatctttgcacatggtgttcttgtgctcttcatctttggtcattccgtcattgttcatactagaaccatcgctatgcagcattgtgccgccagaaccggtatttaccccgttattgtcgacgttatttggcgcgacattttcacgggcgtcaggggctacctggcccgcatcagctgcggcgtttgcctggccgttattagtttgcgctccgctatcggcagccagtgcggcaccgctggcaaggcttagagtggcagtcagaaataatgtggccagttttgtcattttcataggatgctcctgttatggtcgttatgtcggataacctcttccaacagtgcatttgcaggtgaatataaggcattggtttaagatttcagccaggttatgaaacgcagcagagaatcttgaaataattaacaaacaaaggagttacagttagaaattgtaggagagatctcgtttttcgcgacaatctggcgtttttcttgctaattccaggattaatccgttcatagtgtaaaaccccgtttacacattctgacggaagatatagattggaagtattgcattcactaagataagtatggcaacactggaacagacatgaattatcagaacgacgatttacgcatcaaagaaatcaaagagttacttcctcctgtcgcattgctggaaaaattccccgctactgaaaatgccgcgaatacggttgcccatgcccgaaaagcgatccataagatcctgaaaggtaatgatgatcgcctgttggttgtgattggcccatgcagtattcatgatcctgtcgcggcaaaagagtatgccactcgcttgctggcgctgcgtgaagagctgaaagatgagctggaaatcgtaatgcgcgtctattttgaaaagccgcgtaccacggtgggctggaaagggctgattaacgatccgcatatggataatggcttccagatcaacgacggtctgcgtatagcccgtaaattgctgcttgatattaacgacagcggtctgccagcggcaggtgagtttctcgatatgatcaccccacaatatctcgctgacctgatgagctggggcgcaattggcgcacgtaccaccgaaagccaggtgcaccgcgaactggcaagtgggctttcttgtccggtcggcttcaaaaatggcaccgacggtacgattaaagtggctatcgatgccattaatgccgccggtgcgccgcactgcttcctgtccgtaacgaaatgggggcatagcgcgattgtgaataccagcggtaacggcgattgccatatcattctgcgcggcggtaaagagcctaactacagcgcgaagcacgttgctgaagtgaaagaagggctgaacaaagcaggcctgccagcacaggtgatgatcgatttcagccatgctaacagctccaaacaattcaaaaagcagatggatgtttgtgctgacgtttgccagcagattgccggtggcgaaaaggccattattggcgtgatggtggaaagccatctggtggaaggcaatcagagcctcgagagcggggagccgctggcctacggtaagagcatcaccgatgcctgcatcggctgggaagataccgatgctctgttacgtcaactggcgaatgcagtaaaagcgcgtcgcgggtaaggtttaattgtcggatgcgccgtcagagtggcgtatccgatgaatcaccacaggcctgataagtcgcgcagcgtcgcatcaggcaatgtgctccattgttagcaacaaaaaagccgactcacttgcagtcggctttctcattttaaacgaatgacgtttacttcgctttaccctggtttgcaaccgccgctgctttcgctgcgatctcgtcagcattacccagataatagcgtttcagcggtttgaaattctcgtcgaactcatacaccagcggcacgccagtcgggatattaagctcaagaatctcttcttcgctcatgttatcaagatatttcaccagcgcacgtaaagagttaccgtgtgcagcgatgatcacgcgctcaccgctcttcatacgcggcagaatagtttcattccagtaagggatcacgcggtcaatggtcagcgccaggctttccgtcagcggcagttctttctcgctcagtttcgcgtaacgcggatcgtgacccggataacgctcatcatctttagtcagttccggcggagtcactgcaaaaccacgacgccactgtttcacctgctcgtcgccatacttttcagcagtttccgctttgttcagaccctgcaacgcaccgtagtgacgttcgttcagtttccaggatttctcaacgggcagccatgcctgatccagttcgtccagcacattccacagggtatggatagcgcgtttcagcacagaagtgtaagcaaagtcaaagctgtaaccttcctctttcagcagcttacctgctgcttttgcttcgcttacgcctttctcagacagatccacgtcgtaccaaccggtgaaacggttttctttgttccactgactttcgccatgacgaaccagaaccagcttagttacagccatatacttactcctcaaatcatcttttaatgataataattctcattatattgccgcgacgaagcaacagcaatgcttacgcataaccatagcgaaaatagtggcgcagtgtaaggttgttgtgaatattgagttgcaaatatgtcggtgtttgctggtgatttgaacaatatgagataaagccctcatgacgagggcgtaacattactcagcaataaactgatattccgtcaggctggaatactcttcgccaggacgcaggaagcagtccggttgcggccattcagggtggttcgggctgtccggtagaaactcgctttccagagccagcccttgccagtcggcgtaaggttcggttccccggctcggtgtgccgccgaggaagttgccggagtagaattgcagagccggagcggtggtgtagaccttcagctgcaatttttcatctgcactccagacatgcgccgccactttcttgccatcgcctttggcctgtaacaagaatgcgtgatcgtaacctttcactttgcgctgatcgtcgtcggcaagaaactcactggcgatgattttggcgctgcggaaatcaaaagacgttccggcgacagatttcaggccgtcgtgcggaatgccgccttcatcaaccggcagatattcgtccgccagaatctgcaacttgtgattgcgcacgtcagactgctcgccgtcaagattgaaatagacgtgattagtcatattcaccgggcaaggtttatcaactgtggcgcgataagtaatggagatacggttatcgtcggtcagacgatattgcaccgtcgcgccgagattacccgggaagccctgatcaccatcatcactactcagggcaaacagcacctgacgatcgttctggttcacaatctgccagcgacgtttgtcgaacccttccggcccgccgtgcagctggttaacgccctgacttgggctaagcgtcacggtttcaccgtcaaaggtataacggctattggcgatacggttggcataacgaccaatagaggcccccagaaacgcggcctgatcctgatagcattccgggctggcacagccgagcagcgcctcgcggacgctgccatcggaaagcggaatacgggcggaaagtaaagtcgcaccccagtccatcagcgtgactaccatccctgcgttgttacgcaaagttaacagtcggtacggctgaccatcgggtgccagtgcgggagtttcgttcagcactgtcctgctccttgacttggtttacaaacgtaaaaagtctctttaatacctgtttttgcttcatattgttcagcgacagcttgctgtacggcaggcaccagctcttccgggatcagcgcgacgatacagccgccaaatccgccgccggtcatgcgtacgccacctttgtcgccaatcacagctttgacgatttctaccagagtgtcaatttgcggcacggtgatttcgaaatcatcgcgcatagaggcatgagactccgccatcaactcgcccatacgtttcaggtcgccttgctccagcgcgctggcagcttcaacggtgcgggcgttttcagtcagtatatgacgcacgcgttttgccacgatcgggtccagttcatgcgcaacagcgttgaactcttcaatggtgacatcacgcagggctggctgctggaagaaacgcgcaccggtttcgcactgttcacgacgggtgttgtattcgctgccaaccagggtacgtttgaagttactgttgatgatgacgacagccacacctttgggcatggaaactgctttggtccccagactgcggcaatcgatcagcaaggcatgatctttcttgccgagcgcggaaattagctgatccatgatcccgcagttacagcctacaaactggttttctgcttcctgaccgttaagcgcgatttgtgcgccgtccagcggcagatgataaagctgctgcaatacggttccgaccgcgacttccagactagcggaagaacttaacccggcaccctgcggcacattgccgctgatcaccatgtccacgccgccgaagctgttgttacgcagttgcagatgtttcaccacgccacgaacgtagttagcccattgatagttttcatgtgcgacaatgggcgcatcgagggaaaactcgtcgagctgattttcataatcggctgccatcacgcgaactttacggtcatcgcgtggtgcacaactgatcacggtttgataatcaatcgcgcagggcagaacgaaaccgtcgttgtagtcggtgtgttcaccaatcaaattcacgcggccaggcgcctgaatggtgtgagtggcagggtagccaaatgcgttggcaaacagagattgtgttttttctttcagactcatttcttacactccggattcgcgaaaatggatatcgctgactgcgcgcaaacgctctgctgcctgttctgcggtcaggtctcgctgggtctctgccagcatttcataaccaaccataaatttacgtacggtggcggagcgcagcagaggcggataaaagtgcgcgtgcagctgccagtgttgattctcttcgccattaaatggcgcgccgtgccagcccatagagtaggggaaggagcactggaagaggttgtcataacgactggtcagctttttcaacgccagcgccagatcgctgcgctgggcgtcggtcaaatcggtgatccgtaaaacgtgggctttgggcagcagtagcgtttcgaacggccaggcagcccagtaaggcacgacggctaaccagtgttcggtttcgacaacggtacggctaccgtctgccagctcgcgctgaacataatccaccagcattggacttttctgttcggcaaaatattctttttgcaggcggtcttcgcgctcagcttcgttaggcaggaagctatttgcccaaatctgaccgtgcggatgcgggttagagcagcccatcgccgcgcctttgttttcaaaaacctgcacccatgggtacgttttccccagttctgcggtttgctcctgccaggttttgacgatttccgtcaatgctgcaacgctgagctctggcagcgttttactgtgatccggactaaagcagatcacccggctggtgccgcgcgcgctctggcaacgcatcagcggatcgtgactttctggcgcatctggcgtgtcagacatcaaagccgcaaagtcattagtgaaaacgtaagtcccggtgtaatcggggtttttatcgcctgtcacccgcacattacctgcgcagaggaagcaatctggatcgtgcgcaggtaacacctgtttggctggcgtttcctgcgccccctgccaggggcgcttagcgcggtgcggactaaccagaatccattgcccggtgagcgggttgtagcggcgatgtggatgatcaacgggattaaattgcgtcatggtcgttccttaatcgggatatccctgtggatggcgactctgccagtgccaggtgtcctgcgccatttcatcgagtgtgcgcgttacgcgccagttcagttcacggtcggctttgctggcgtccgcccagtaggccggaaggtcgccctcgcgacgcggtgcaaaatgataattaaccggtttgccgcaggctttgctgaaggcattaaccacgtccagcacgctgttgcctacgccagcgccgaggttgtagatgtgtacgcctggcttgttcgccagtttttccatcgccacgacgtgaccgtccgccagatccattacgtggatgtaatcgcgtacgccagtaccatcttcggtcggataatcgttaccaaaaatcgccaggctgtcgcgacggcctacagcaacctgggcgatgtatggcatcaggttattcggaatgccttgcggatcttcgcccatatcgccgctcggatgcgcgccaaccgggttgaagtagcgcagcagggcaatgctccagtccggctgggctttttgcagatcggtgaggatctgttccaccatcagcttgcttttgccgtaagggctttgcggtgtgccggtcgggaagctttcaacgtatggaattttgggctgatcgccataaacggtggcggaggagctaaaaataaagtttttgacgttagcggcgcgcatggcgctaatcaggcgcagagtgccgttgacattgttgtcgtaatattccagcggtttttgtacgctttcgcccacggctttcagcccggcgaagtggatcacggtgtcgatagcgtgatcgtgcaggatctcggtcatcaacgcttcgttacgaatatcgccttcaacaaacgttggatgtttgccgcctaaacgctcgataacaggcagtacgatgcgcttactgttacagaggttatcaagaatgatgacatcatgaccgttttgcagtaattgcacacaggtatgacttccaatgtaaccgctaccaccggtaaccagaactctcataattcgctccattaggcttatggtatgaaataaccatagcataacaaagatgcgaaaagtgtgacatggaataaattagtggaatcgtttacacaagaatttagccgttttttatgcgcgattaagtgattataaaacagagggtttatgaatgattgcgctttttatctgaaaaaagacgcggtttcatgcctgcatgcgtcgaaccgttggccggagagggtgctaaggccgcctccggcaaggtcagcactaccgactcaatatatttttgtcagcacatagcgatagagtccaccgtccggcacgaactcaagacgatgggtaatacaggcaggcgcatcttcagcgtggtggctaacaaacaacaattgcgtttcaccttcgctaatcagcacatcaacaaaacggcggataagctggcgattcagcggatcaagcccctgtagtggttcatcgagaataagcaacgtcggatgtttcaccagtgcgcggacaatcagcgccagacgctgctgtccccaggaaagactatggaacggagcgtcagccgtgcgtttatcaatgccgagaatatccagccactgctgcaccagtttttgctggcgatcgctaacggcctgataaatgccaatgctatcaaaatagccagaaagaatcacattacgcacggtagtgctgacccggtaatccagatgcaaactactgctgacgtaaccgatatgctttttgatatcccagatggtttcgccgctgccgcgacgtcgtccgaaaagcgtcaaatcgttgctgtaaccttgcggatgatcgccagtaaccaggcttaataacgtgctttttcctgcaccatttggcccgacaatttgccagtgttcgcctggattcacctgccagctaaggttattaagaatggggcgatcgttataagaaaccacgccattgttcagcacaatgcgcggttcgttggcgggtaaggcgtgacgtgcactaggttcatccggctccggcagttgcacaccttcaagctgttcactatgcgccagttgcgcgacgagtgcttgttggagcagttcctctttagcgccagtttccgctaacgtgcaatccgccagcacgccagcaaactggacaaactccgggatctcatcgaagcgattgagcaccagtaccagagtaataccggactgatgtaagctggcgagtcgctcagccagctgctgacgactggcaacatccaggccatcgaacggctcatcaagaatcaacaagtcaggctcgctcatcagcgcctgacacagcagggtttttcgcgtctcgccagtggaaaggtatttaaagcgtcggtcgaggagggcggtaataccgaactgctgcgccagttgcatgcaacgcggtgcatcctttacttcatcctgaatgatctcagccgtagtgcgtccggtgtcatcttcgccagggccgagcatatcggtgttattccgctgccattcgtcgctgacgagtttttgcaattgctcgaaggagagacgagtgatgtgggaaaactggctttgccgttcacctttcaaaagcggaagttcccccgccagcgcgcgggccagggcgcttttcccgcttccattgctaccgacaaacgcccaactatcacccgcgtttaacgttagctgaggcaattgcagcgtttttgtgtcgctaagacgaaacgtgccttgcaaaatttgcaagctactcattttatatcccactttgtgcagcgattactgacagggatacgtgtttcataacaaattgtcaacacgcttagcacagcgtggcgataatcacgctgtcggcattaaagtaggccgtgacattctgtccttgctgaagagaagtcgcttcatttaccggcactgtggcgcacagtgtttgcccgtcgggtagcgccattaatacttcgcactgctctgcgccgcgctcaatatgactaataatacccggtaattggttgtcagcgttttgcgcgaccgcctcgtcctgagtaatacctacccacggcgcttttagcaatatcaacacttctttgccttcatccagccccagacgcgcgccgctttgtgcggtaattgcgactttcaggcgtgtttttccgtcagccagtaagacatcaacatgctgttgaacgtcatcatgatcgcgggcggtgatggtaccgaaccactggttacgggcgctggtttgcagactaaaacgactgatcgcggccagcaggctgttcagcggcagggcgtcatcgtcacttaacacatcaaaggctttttgctggatttgcgccagtaagtcatagagctgaatcagtcgctgaccatagcgggtcagtactgcgccgccgccacctttaccgcctgttgcgcgctcgaccagaatatgctcacttaactgattcatctcgttaatggcatcccaggcgcttttatagctaataccggcatctttcgctccctggctaatggaaccggaaagcgcaatgtgttttagtaggctaatgcggcgcgggtcggcgaataatttttgttggagcttaagggtgagaaggatttcggcctgcataacaatgtcctggcaaaagtcttattgtgacggaaaacgaacgccacgcaaagctgaccgcacaaaaggggagtgcttttctgtgcttagcggttagaatagtctcatgactatatctggagttgaccatgttagagttattaaaaagtctggtattcgccgtaatcatggtacctgtcgtgatggccatcatcctgggtctgatttacggtcttggtgaagtattcaacatcttttctggtgttggtaaaaaagaccagcccggacaaaatcattgattccctgaatgcccgcttagtcgggcattttctttttctcaacttcctgcttttcctgccgatattttttcttatctacctcacaaaggttagcaataactgctgggaaaattccgagttagtcgttatattgtcgcctacataacgttacattaaggggttaccaatggctcgtaaatggttgaacttgtttgccggggcggcactctctttcgctgttgctggcaatgcactggcagatgaagggaaaatcacggtgttcgccgccgcaagtctgactaacgcaatgcaggacattgctacgcagtttaaaaaagagaaaggcgtggatgtggtttcttctttcgctagcagttctactctcgcccgtcagattgaagcgggtgcgcctgcggatctgtttatttctgccgatcagaaatggatggattatgcggttgataaaaaagcgatcgatacagctacgcgtcagacactgctcggcaatagcctggtcgttgtagcaccgaaagccagcgtgcagaaagatttcaccatcgacagcaaaaccaactggactagtctgctgaatggcggtcgcctggcggttggcgatccggaacatgttcccgctggcatttatgcaaaagaagcactgcaaaaactgggcgcatgggatacgctctctccgaaactggccccagcggaagatgttcgtggggcgctggcgctggtcgaacgtaacgaagcgcctctgggcattgtctacggttctgacgcagttgccagcaaaggggtaaaagtggttgccaccttcccggaagatagtcataaaaaagtggaatatccggttgctgttgtggaagggcataacaatgcgacagtgaaagcattttatgattatctgaagggaccgcaggcagcggaaatctttaaacgttacggatttacaatcaagtaatgatactgaccgatccagaatggcaggcagttttattaagcctgaaagtttcttccctggctgtgctgtttagcctgccgtttgggatcttttttgcctggttactggtgcgttgcacgtttccgggcaaagctctgctcgacagcgtactgcatctaccgctggtgttaccgcccgtggtcgtcggttacttattattagttagcatgggacggcgcggatttatcggtgaacgtctgtatgactggtttggtattaccttcgcctttagctggcgcggcgcggttctcgctgccgccgtcatgagctttccgctgatggtgcgggcaattcgtctggcgctggaaggggttgatgtcaaactggaacaggccgcaagaacactgggggccgggcgctggcgcgttttctttactatcacgttaccgctgaccttaccgggaattattgttggtacggtactggcttttgctcgttctctcggtgagtttggtgcaaccatcacctttgtgagcaacattcctggtgaaacgcgaaccattccttctgccatgtataccctgatccagacccccggcggggaaagtggagcggcgagactgtgcattatttctattgcgctggcgatgatctccctgttgattagtgaatggctggccagaatcagccgtgaacgggcggggcgctaatcatgctggaactgaatttttcccagacgttgggcaaccattgcctgactattaatgaaacgctgcccgccaatggcatcactgctatctttggcgtctccggtgccggaaaaactagcctgattaacgccatcagtggactgacgcgcccgcaaaaagggcggattgtcctcaatgggcgggtactaaatgatgccgaaaaaggtatctgcctgacgccggaaaagcgtcgcgttggctatgtttttcaggatgcgcggctgttcccgcattacaaagtgcgtggcaatctgcgctacggcatgagcaaaagtatggtcgatcagttcgataagctggtggcgcttttaggcattgaaccgttgcttgaccgtttaccaggcagcctgtccggaggcgaaaaacagcgcgtggcgattggtcgggctttgctgacagcaccggaattgctgttgctggatgaaccgctggcgagtctggatattccgcgtaaacgcgaactgttgccttatctgcaacggctgacacgggaaatcaacattccgatgttgtatgtcagccatagcctggatgagatcctccatctggcagacagagtgatggtactggaaaacggtcaggtgaaagcctttggcgcgctggaggaagtgtggggcagtagcgtgatgaatccgtggctgccgaaagagcaacaaagtagcattctgaaagtgacggtgcttgagcatcatccgcattacgcgatgaccgcgctggcgctgggcgatcagcatttgtgggtcaataagctggacgaaccgctgcaagctgcgctacgtatccgcattcaggcttccgatgtttctctggttttacaaccgccgcagcaaaccagcattcgtaacgtattgcgggcaaaagttgttaatagttatgacgacaacggccaggtggaagtggaactggaagtcggcggtaaaacgctgtgggcgcgtatcagcccgtgggccagggatgaactggcgatcaaacctggcctgtggctgtacgcgcaaattaaaagtgtgagcataaccgcctgattaaatcaggtggctataaatgaactgggcaatgctgtcggtggtgttatcaccaatcacaatgttggcgcgcgcttttaccgcgtcatcggcgttgcccatcgccacgcctgtaccagcggcttccagcatactgatatcattaaagttatcgccgaatgccacgacgttttccatgctccaaccttgcgcctcaacccatttcgtcaaacgtttacctttgctgttgccgccgcgtgcaatatcaacctgatcgtgccaggaccattcacactccagtcccagttcatgttcgacatgcttaccaaaatgctgcaattgcggcaggtcatcgtgcgtcagggcgaacttccatacggcgttaacttgttgcgccgtttcagccagagaagcgacttgtgtgaaagtcggacgctgttccggcggcagggtttgcgcccagttagatgtgcgaatgacatgcccggtcgggtgctcatagaccattgcatcatcgacatacatcagaccgtgaatgtggtgttcattcagcatctcaatgagttgcagggctttaataacgggcattgggtccgcttccagcacggtttttgcatgataatcatacaaataggtgccattacagcaaatagcaggtgtatccagcgccagcgcctgataaaaaggatgaatagcgacgtgatggcgacctgtgacgatgattaattgatagcctgcttcgcgagcgcgggccagggcttctatgctactaggaagcagggtctttttcggggtcaataaggtgccgtctaagtcgagagcaatcacgcgtgtggtcatggcgtattccagattaaggttaagaattttcgtctgcgcgaatggtacaccgataccactatcggacaaaattctgcgttttaattcagcattcaccgccaaaagcgactaattttagctgttacagtcagttgctaaatgcaaaggagcattcatgaagcaaacagtttatatcgccagccctgagagccagcaaattcacgtctggaatctgaatcatgaaggcgcactgacgctgacacaggttgtcgatgtgccggggcaggtgcagccgatggtggtcagcccggacaaacgttatctctatgttggtgttcgccctgagtttcgcgtcctggcgtatcgtatcgccccggacgatggcgcactgacctttgccgcagagtctgcgctgccgggtagtccgacgcatatttccaccgatcaccaggggcagtttgtctttgtaggttcttacaatgcgggtaacgtgagcgtaacgcgtctggaagatggcctgccagtgggcgtcgtcgatgtggtcgaggggctggacggttgccattccgccaatatcagtccggacaaccgtacgctgtgggttccggcattaaagcaggatcgcatttgcctgtttacggtcagcgatgatggtcatctcgtggcgcaggaccctgcggaagtgaccaccgttgaaggggccggcccgcgtcatatggtattccatccaaacgaacaatatgcgtattgcgtcaatgagttaaacagcagtgtggatgtctgggaactgaaagatccgcacggtaatatcgaatgtgtccagacgctggatatgatgccggaaaacttctccgacacccgttgggcggctgatattcatatcaccccggatggtcgccatttatacgcctgcgaccgtaccgccagcctgattaccgttttcagcgttagcgaagatggcagcgtgttgagtaaagaaggcttccagccaacggaaacccagccgcgcggcttcaatgttgatcacagcggcaagtatctgattgccgccgggcaaaaatctcaccacatcagcgtatacgaaattgttggcgagcaggggctactgcatgaaaaaggccgctatgcggtcgggcagggaccaatgtgggtggtggttaacgcacactaaccgctgatttacccggcgcagtctctcctgcgccggtgtattaacctatctcctgtaacgcgtgtctctggcgttcgacgatattggtccacaaattgtctttatcgtcagtccataaattaatcagcaaggcaaaaaagcgttctgctgctggagaaagtacggcatctttacggcgaattattcccaatgttcgacgtataacgggttccaccaatgggataccaataatgctagaatagggcgcatgaggcattgccaggccaggaagcgcgctaatccccagtcccgcctccaccagtcctaaactcgtgctaagatgacgcacttcgtaaaaccagtccagcttccagggcttgtcggccagctgttgttctatcaacagtcggttgccgctggaggagcgtacgccaatcattttgtaacccactaactcctgccattctacaagctgctttttggccaatggatggtcacgccgacaggccagcacgaacggctcgttgaccagtggggtaaaatcaatggaactatttgtgacgttgttcatgtttatgccaaagtcactttcgttacacagcacgctttccatgcaattattcgtgccttgttccagaatccgcactttaatattgggatacagctcattaaatttaccgattgccagcggtaaaaaataaaatactgcggtcggaatacacgctaacgtcaccataccacgatgataagcattcatatcacgaatattaaaaagcgtttcatcgaatttctttattaattcccgcgcctccgggagcaacctttttcctgcttttgttaacgtaaccttgcgagttgtacgctcaaatagttgaacatgtaaatcttcctccatcttttttattcttcgcgttaatgcaggttgcgtaatattgagtaatttagcggcattgttaaagctactggactctgccagtatgacaaatgccttcatactacttaattcatgcttcattattactccggaaaatggaaggctgctttttgggtggctggccgttaaaaattttaactgcatttagccaacttaaattaatgaaaaaatgttattaatcgttgagctaaagtcattagagatgctttgcccttaatgtaaccatatcgcaataagttatgtttttaaattgagggcattattatgaaaaaaataccctgcgtgatgatgcgaggtggaaccagcaggggcgcgttcctgttagcggaacatttacccgaagatcaaacgcagcgcgataaaatattgatggcaattatgggttccggtaacgatctggaaattgacggtattggcggcggtaatccactgaccagtaaagtcgccattattagccgttccagcgatccgcgtgctgatgtcgattatctgtttgcgcaggtaatcgttcatgagcaacgtgtcgataccacgcctaactgcggcaatatgctgtctggtgttggggcattcgccattgaaaatggtttgattgcagcgactagcccagttactcgcgtacgtatccgcaacgtcaatacgggtacgttcatcgaagctgatgtgcaaacgccaaatggtgttgtcgagtacgagggtagcgccagaattgacggcgtaccgggtactgccgcaccggttgcgctcactttcctgaatgccgctggaaccaaaaccggaaaagttttcccgactgataatcagattgattattttgacgatgtcccggtgacctgtatcgatatggcgatgccagtcgtcattattccggctgaatatctgggaaaaacaggttatgaattaccggcggaactggatgccgacaaagcattattagcccgcattgaatctatccgtctacaagcgggtaaagcaatgggcttaggtgatgtcagtaatatggttatccctaaacctgtgcttatttctccagcgcagaaaggcggggcaattaatgtgcgttattttatgccgcattcttgccatcgcgcgctggcgataaccggtgctattgctatttccagtagttgtgcattggaaggcaccgtcacccgacaaatcgtcccttctgtaggatacggcaatatcaatattgaacaccccagtggtgcgctcgacgttcatttaagtaatgaaggtcaggatgccacgacgttacgcgcatctgttattcggacgaccagaaaaatattttccggtgaagtttatcttccctgaaaaaattcgttgtcaggataaggacaatcaataaaggacttctgtatgagtcatacagaaagaacaggattttaaatgaataagaaaagcttatggaagctaattctgatattagcgatcccatgtattattggttttatgccagctccggcaggattaagcgaactggcgtgggtgctttttggtatttacctggcggccattgtggggctggttatcaagcctttcccggaacctgtcgtactgttaattgccgttgctgccagtatggtggtggtcggtaacttatccgacggtgcgtttaaaaccaccgccgtattaagcggttactctagtggtaccacctggctggtgttcagcgcgtttaccttaagcgccgcatttgtgaccaccggtttaggtaaacgtattgcctatctgctgattggtaaaatcggtaacaccacgctgggtctgggttacgttacggtattcctcgatctggtactggctccggcaacaccgtctaacaccgcgcgtgcgggcggcattgtgttaccgatcatcaacagcgtggcggtggctttggggtccgaaccggaaaaaagtccgcgtcgtgtcggacattacctgatgatgtccatttacatggtcaccaaaaccaccagctatatgttctttaccgcaatggcggggaacattctggcgctgaaaatgatcaacgacattctgcacctgcaaattagctggggtggatgggcgctggcagccggattgccgggcatcattatgctgctggtcaccccgctggtgatttacaccatgtatccaccagaaattaagaaggtggataacaaaaccatcgctaaagcgggccttgccgaactaggaccgatgaaaatccgcgaaaaaatgctgctcggtgtctttgtgctggcgctgctgggctggattttcagtaagtctctgggggttgatgaatccaccgtggcaatcgttgttatggcaaccatgctgctgctgggtatcgttacctgggaagacgtggttaaaaataaaggcggctggaataccttaatctggtacggcggtattatcggcttaagctccttattaagcaaagttaaattcttcgaatggttagctgaagtctttaaaaataacctggcatttgatggtcacggtaacgttgctttcttcgttattattttcctcagcattatcgtgcgttatttcttcgcttccggtagtgcctatatcgttgctatgttaccggtatttgccatgctggcgaacgtctccggcgcaccgttaatgttaaccgcgctggcactgttgttctccaactcctatggcggcatggttactcactatggcggcgcggcaggtccggtcatctttggcgtgggttataacgatattaaatcctggtggttggtcggtgcggtactgacgatattaaccttcctggtgcatatcaccctcggcgtgtggtggtggaatatgctgatcggctggaacatgctgtaaatattctcgtcatacttcaagttgcatgtgctgcgtctgcgttcgctcaccccagtcacttacttatgtaagctcctggggattcactcgcttgtcgccttcctgcaactcgaattatttagagtatatccatttattatctttctgcgcacttcacggtgcgcagatatctggagcatttgatgatcaagttatctgaaaaaggcgtgtttctcgccagtaataacgaaataattgccgaagaacatttcaccggcgaaattaaaaaagaagaagccaaaaaaggcactattgcctggtctattctctctagccataatacgtccggaaatatggataaacttaaaattaagtttgatagtttagcctctcacgatattacctttgttggtattgtacagaccgctaaagcgtccggtatggaacgtttcccgctgccgtatgtgctgaccaactgccataacagtctctgcgccgtcggcggcactattaacggtgatgaccatgtttttggtttaagcgcggcccagcgttatggcggtatttttgtgcctccgcatattgcggtcatccatcaatatatgcgtgagatgatggcaggcggcggcaaaatgatcctcgggagtgacagccacacccgttacggtgcattagggacaatggcagtcggtgagggcggcggtgagttggtaaaacagctgcttaatgacacctgggatatcgactatccgggcgtggttgcggtgcatctgaccggaaaacctgcgccgtatgtggggccacaggatgtggcgctggctatcattggcgcggtgttcaaaaacggttacgtcaaaaacaaagtcatggagttcgttggaccgggcgttagcgcgctctctaccgatttccgtaacagcgttgacgtgatgaccactgaaacgacctgtttaagttctgtctggcaaaccgatgaagaagtccataactggctggcgctgcacggtcgcggccaggattactgccagcttaaccctcaaccgatggcgtactacgatggctgcatcagcgttgatttaagcgccatcaaaccaatgattgcgctgccgttccacccgagcaacgtgtatgaaatcgacacactgaaccagaacctgaccgacattctgcgtgagattgaaattgagtccgaacgcgtggcgcacggtaaagccaaactcagcctgctggataaagtggaaaatggtcgcctgaaagtgcagcaggggattatcgcgggctgttctggcggtaactacgaaaacgtcatcgcggcggcgaatgcactgcgcggtcaatcctgtggcaatgacaccttcagcctggcagtttacccgagtagtcagccggtgtttatggatctcgccaaaaaaggtgtggtagcagatttgattggcgcaggcgcaatcatcagaaccgcgttctgcggcccatgctttggcgcgggcgatacgccaatcaacaacggtttgagtattcgccacaccacgcgtaacttcccgaaccgcgaaggctctaagccagctaatgggcagatgagtgcggtggcgttgatggacgctcgttctatcgctgcgactgcggcaaacggtggctatttaacctctgccagcgaacttgattgctgggacaacgtgccggagtacgccttcgatgtaacgccgtataaaaaccgtgtttatcagggctttgtgaaaggggcaactcagcaaccgctgatttacgggccgaacattaaagactggccggaattgggtgcgctgactgacaatatcgtcctgaaagtgtgcagcaagatcctcgacgaagtgaccaccaccgacgaactgattccttccggtgaaacctcttcttatcgtagtaatccgattggtctggcggagtttaccctgtctcgccgcgatcccggttatgttagcagaagtaaagcgactgctgagctggaaaatcagcgtctggcggggaatgtcagcgagctgacagaggtgtttgcgcgcattaagcagattgctggtcaggagcatattgatccgctgcaaactgaaattggcagcatggtctatgcggtgaaaccaggcgatggttctgcgcgtgaacaggcggcgagctgccagcgtgtgattggcggtctggcgaatattgccgaggagtacgcgactaaacgctatcgttctaacgtcatcaactgggggatgttaccgctgcaaatggcggaagtaccaacctttgaagtgggggattacatttacatccctggcattaaagcggcgctggataatccgggtacgacgtttaaaggttatgtgatccatgaagatgcgccggtaacggaaattacgctctatatggaaagtctgactgctgaagagcgcgagattatcaaggcgggtagtttgattaacttcaataaaaaccgtcagatgtaaaaagcgccatgtgaatgtaggtcgcattcggcacttattgtcggatgcgatgcttgcgcatcttatccgacctacgaatcgcatcgaatctgtaggccagataaggcattttcgcagcatccggcacttattgtcggatgcgatgcttgcgcatcttatccgacctacaaatcgcatcgaaccgtaggccggataaggcgtttacgccgcatccggcaaatagttaattgcccttacttcttcgcctctgcaaccactttactacccacgccgcggttattgtattcccacatgcggttgtagttagtgtcattcagattgcgctgtatttcgtcgttatcatctacgctgccggtattacccgcaaacggacgattagagatcaccgcatcggcccacggtttagccgtgttaaaaccttcgttgatggcgctatcacggatcaccacctgaccgttggtattggcatcaacatccaggctgcggcccagttgcgccacaccatcaccgaaagcattgaaacggctgtttacggcgaggaaaccgtagtaaatgttggacagcgtagccggtgcaaacacatacgcttcttgctgagtacgactgttcaccacgcggaattcggtgttatcgaacaccactgcgccgcgaccagaaacgatatccacatccccttcaatgtagctgttggtcaccagcgtacgcggctgacgattcgtttccagacggttctgcacaccgctgttggtgacaaagaaggtgttctgacgaccgagaatgttaacgttgttaatctgtacctggtcaccatcagtacgcagtgccaccgccggatggttacctgcatctacgctatcgcccagcgtgttttcgatggtcagattttgcagttgcaggccattgttttgactccagaagaccgcagagcagagaacaccgatactgtcgctgcgtttgctctggcagctatcgtacatataccacgctggtttacctggcatatatttgccgcgcgggttgacgtcgtgacgccagtcggcagggctcatgccaccattaagggaaagcccaatcttcacatcaatcggtttttcacctgtaccgtacagagtaattccacccggagcggcagggacatataccgttccctgatactcaccaggcatcacggcaatatactggcgcttgttggtacgcttgataattgccgcatctaccgccgcctgaatcgtggtatgcgttacaccttgagtgcccgccgggccgacaacaaagtcaggttgcgcaggcagggtaatcggggaaggattccacgctgcagcacctggtgtcagggatgcaaaatagtgttgagcatcgaaattctgcgcttcttttgcgctcagaatcgggcgagaagaggtaccaggcgcggtttgatcagaaggacgttgatcgggcggggtactgctacaggcggtcagcgtcacgccaaaagccaatgccagcgccagacgggaaacactaaatgtgttcacaggttgctccgggctatgaaatagaaaaatgaatccgttgaagcctgcttttttatactaacttgagcgaaacgggaaggtaaaaagacaaaaagttgtttttaatacctttaagtgataccagatggcattgcgccatctggcagagtgattaactaaacatcgcagtaatgctggcgcttgccagagagtggaaatgaacgttaaacccgaccatcgcgccgctggcaccttcatcgacatcaatacgttctatatccagcgcgtgaacggtaaaaatgtagcgatgagtttcgcctttcggcggtgctgcgccatcgtacccggttttaccaaagtcggtacgcgtctgcaaaacgccgtctggcattgctaccagaccagagccaaacccttgcggtaatacgcgggtatcagcgggtaagttaacaactacccagtgccaccagccggagccggttggcgcatccgggtcgtagcaggtgacaacaaaacttttcgttcccgcaggaacatcatcccacgccagatgcggactaatattatcgccatcgtaacccatgccgttaaagacatgacgatgcggcaatttatcgccatcgcgcagatcgttactgatgagtttcatgaaccctcctttcttgtttgcagaaagtgtagccagaaaccctcacgcggacttctcgttattggcaaaaaaatgtttcatcctgtaccgcgcggttaaccgctgcggtcagacgctgcaactgttgcgggagaataatatagggcggcatcaggtaaatcagtttgccaaaaggccggatccagacaccctgttcgacaaagaatttttgcagcgccgccatattcaccggatgagtggtttcgaccacgccaatggcccccagtacgcgcacatcggcaaccatttcggcatcacgggcgggggcaagttgctcgcgcagctgtacttcaatatccgccacctgttgctgccagtcgccagattcgagaatcgccaggctggcgtttgctgccgcgcaggccagcggattgcccataaaagttggcccatgcataaagcaaccggcttcaccgttactgatggtttctgcaacctcgcgcgtggtgagtgtggcggaaagggtcattgtgccgccggttaaggctttaccgaggcacaaaatgtccggcgcgatttctgcatgttcacaggcaaacagtttcccggtacgaccaaatccagtggcgatctcgtcggcaatcagcaagataccttcgcgatcgcatattttgcggattcgttttaaccattccggatggtacatgcgcatcccgcctgcgccctggacaatcggctcaatgatcaccgccgcgatttcatgacgatgcgccgccatcaggcgggcaaagcccaccatatcgcgctcatcccattcgccatccatgcggctttgcggggcgggagcaaacaggttttctggcaggtagcctttccacagactgtgcatactgttatccggatcgcacacgctcatcgcgccaaaggtatcgccatgataaccattgcggaaggtcagaaaacgctggcgcgcttcgcctttggcttgccagtactgcaacgccattttcatcgccacttccaccgctacggaaccggagtccgcgagaaaaacgcactccagcggttgcggcgtcatcgccaccagtttgcggcacagctcaatggctggcgcatgggtgataccgccaaacatcacatggctcatggcatcaatttggctcttcatcgccgcattaagctgcgggtgattgtagccgtggatcgccgcccaccaggagctcataccgtcaaccaggcgtctgccgtcagacaaaatcagctcgcaaccttcggcgctcaccaccggataaaccggcagaggggaggtcatggatgtgtatgggtgccagatatggcgttggtcaaaggcaagatcgtccgttgtcataatcgacttgtaaaccaaattgaaaagatttaggtttacaagtctacaccgaattaacaacaaaaaacacgttttggagaagccccatggctcaccgcccacgctggacattgagccaagtcacagaattatttgaaaaaccgttgctggatctgctgtttgaagcgcagcaggtgcatcgccagcatttcgatcctcgtcaggtgcaggtcagcacgttgctgagcattaagaccggagcttgtccggaagattgcaaatactgcccgcaaagcagccgctacaaaaccgggctggaagccgagcggttgatggaagttgaacaggtgctggagagcgcgcgcaaagcgaaagcggcaggaagcacgcgcttctgtatgggcgcggcgtggaagaatccccacgaacgcgatatgccgtacctggaacaaatggtgcagggggtaaaagcgatggggctggaggcgtgtatgacgctgggcacgttgagtgaatctcaggcgcagcgcctcgcgaacgccgggctggattactacaaccacaacctggacaccagcccggagttttacggcaatatcatcaccacacgcacttatcaggaacgcctcgatacgctggaaaaagtgcgcgatgccgggatcaaagtctgttctggcggcattgtgggcttaggcgaaacggtaaaagatcgcgccggattattgctgcaactggcaaacctgccgacgccgccggaaagcgtgccaatcaacatgctggtgaaggtgaaaggcacgccgcttgccgataacgatgatgtcgatgcctttgattttattcgcaccattgcggtcgcgcggatcatgatgccaacctcttacgtgcgcctttctgccggacgcgagcagatgaacgaacagactcaggcgatgtgctttatggcaggcgcaaacagcattttctacggttgcaaactgctggccacgccgaatccggaagaagataaagacctgcaactgttccgcaaactggggctaaatccgcagcaaactgccgtgctggcaggggataacgaacaacagcaacgtcttgaacaggcgctgatgaccccggacaccgacgaatattacaacgcggcagcattatgagctggcaggagaaaatcaacgcggcgctcgatgcgcggcgtgctgccgatgccctgcgtcgccgttatccggtggcgcaaggagccggacgctggctggtggcggatgatcgccagtatctgaacttttccagtaacgattatttaggtttaagccatcatccgcaaattatccgtgcctggcagcagggggcggagcaatttggcatcggtagcggcggctccggtcacgtcagcggttatagcgtggtgcatcaggcactggaagaagagctggccgagtggcttggctatagccgggcactgctgtttatctctggtttcgccgctaatcaggcagttattgccgcgatgatggcgaaagaggaccgtattgctgccgaccggcttagccatgccagtttgctggaagctgccagtttaagcccgagccagcttcgccgttttgctcataacgatgtcactcatttggcgcgattgcttgcttccccctgtccggggcagcaaatggtggtgacagaaggcgtgttcagcatggacggcgatagtgcgccactggcggaaatccagcaggtaacgcaacagcacaatggctggttgatggtcgatgatgcccacggcacgggcgttatcggggagcaggggcgcggcagctgctggctgcaaaaggtaaaaccagaattgctggtagtgacttttggcaaaggatttggcgtcagcggggcagcggtgctttgctccagtacggtggcggattatctgctgcaattcgcccgccaccttatctacagcaccagtatgccgcccgctcaggcgcaggcattacgtgcgagcctggcggtcattcgcagtgatgagggtgatgcacggcgcgaaaaactggcggcactcattacgcgttttcgtgccggagtacaggatttgccgtttacgcttgctgatagttgcagcgccatccagccattgattgtcggtgataacagccgtgcgttacaactggcagaaaaactgcgtcagcaaggctgctgggtcacggcgattcgcccgccaaccgtacccgctggtactgcgcgactgcgcttaacgctaaccgctgcgcatgaaatgcaggatatcgaccgtctgctggaggtgctgcatggcaacggttaataaacaagccattgcagcggcatttggtcgggcagccgcacactatgagcaacatgcagatctacagcgccagagtgctgacgccttactggcaatgcttccacagcgtaaatacacccacgtactggacgcgggttgtggacctggctggatgagccgccactggcgggaacgtcacgcgcaggtgacggccttagatctcagcccgccaatgcttgttcaggcacgccagaaggatgccgcagaccattatctggcgggagatatcgaatccctgccgttagcgactgcgacgttcgatcttgcatggagcaatctcgcagtgcagtggtgcggtaatttatccacggcactccgcgagctgtatcgggtggtgcgccccaaaggcgtggtcgcgtttaccacgctggtgcagggaagcttacccgaactgcatcaggcgtggcaggcggtggacgagcgtccgcatgctaatcgctttttaccgccagatgaaatcgaacagagcctgaacggcgtgcattatcaacatcatattcagcccatcacgctgtggtttgatgatgcgctcagtgccatgcgtagcctgaaaggcatcggtgccacgcatcttcatgaagggcgcgacccgcgaatattaacgcgtagccagttgcagcgattgcaactggcctggccgcaacagcaggggcgatatcctctgacgtatcatctttttttgggagtgattgctcgtgagtaaacgttattttgtcaccggaacggataccgaagtggggaaaactgtcgccagttgtgcacttttacaagccgcaaaggcagcaggctaccggacggcaggttataaaccggtcgcctctggcagcgaaaagaccccggaaggtttacgcaatagcgacgcgctggcgttacagcgcaacagcagcctgcagctggattacgcaacagtaaatccttacaccttcgcagaacccactagcccgcacatcatcagcgcgcaagagggcagaccgatagaaagtttggtaatgagcgccggattacgcgcgcttgaacaacaggctgactgggtgttagtggaaggtgctggcggctggtttacgccgctttctgacactttcacttttgcagattgggtaacacaggaacaactgccggtgatactggtagttggtgtgaaactcggctgtattaatcacgcgatgttgactgcacaggtaatacaacacgccggactgactctggcgggttgggtggcgaacgatgttacgcctccgggaaaacgtcacgctgaatatatgaccacgctcacccgcatgattcccgcgccgctgctgggagagatcccctggcttgcagaaaatccagaaaatgcggcaaccggaaagtacataaaccttgccttgttgtaaccattctgtatttggttaaattgcgagcgagatcgcgtcttcgattgactgcaatttaaccaattaaattctaaaataatcacgaaaaaaattttacttccgcctcatgcggcgaatgtgggaattgcccaggcggcgggggataggggctggagacagttatccactattcctgtggataaccatgtgtattagagttagaaaacacgaggcaagcgagagaatacgcggcttgcacgcgaattggcgttaaagacggctcaaagaaatatcttttattttttaactggttagataaatgcaatggcagtcactgaacaggcatctcttgccataaaactgtcatcactcatcttgacaaatgttaaaaaagccgttgctttggggataacccggtaaggccggagttttatctcgccacagagtaaattttgctcatgattgacagcggagtttacgctgtatcagaaatattatggtgatgaactgtttttttatccagtataatttgttggcataattaagtacgacgagtaaaattacatacctgcccgcccaactccttcaggtagcgactcatgagtaaaccgttcaaactgaattccgcttttaaaccttctggcgatcagccagaggcgattcgacgtctcgaagaggggctggaagatggcctggcgcaccagacgttacttggcgtgactggcagtgggaaaaccttcaccattgccaatgtcattgctgaccttcagcgcccaaccatggtacttgcgcccaacaaaacgctggcggcccagctgtatggcgaaatgaaagagttcttcccggaaaacgcggtggaatatttcgtttcctactacgactactatcagccggaagcctatgtaccgagttccgacactttcattgagaaagatgccagcgttaacgaacatattgagcagatgcgtttgtccgccaccaaagcgatgctggagcggcgtgatgtggttgtggtggcgtctgtttccgcgatttatggtctgggcgatcctgatttatatctcaagatgatgctccatctcacggtcggtatgattatcgatcagcgcgcgattctgcgccgactggcggagctgcaatacgctcgtaatgatcaagcattccagcgtggtactttccgcgttcgtggcgaggtgatagatatcttcccggcagaaagcgatgacattgcacttcgcgtggaactgtttgacgaggaagtggaacgattgagcttatttgacccgctgaccgggcagattgtttccactattccacgttttaccatctacccgaaaacgcactacgtcacaccgcgcgagcgcatcgtacaggcgatggaggagatcaaagaagagctggccgccagacgcaaagtgctgttggaaaacaacaaactgctggaagagcagcggctgacccagcgtacccagtttgatctggagatgatgaacgagctgggctactgtagcgggattgaaaactacagccgcttcctctccggtcgtggaccgggtgagccaccgccgacgctgtttgattacctgcctgccgatgggctgctggtcgtcgatgaatctcacgtcaccattccacaaattggcggcatgtatcgcggtgaccgggcgcgtaaagagacactggtggagtacggcttccgcctgccaagtgcgctggataaccgtccgcttaagtttgaagagttcgaagcattagcgccgcaaaccatctatgttagcgcgacgccgggtaattacgagctggaaaaatccggcggcgatgtggtggatcaggtggtgcgtccaaccggattgcttgacccgattatcgaagtgcggccggtggcgacacaggttgatgatcttcttagcgagattcgtcagcgagcggcaattaacgaacgcgtactggtcaccacactgaccaagcggatggcggaagatcttaccgaatatctcgaagaacatggcgagcgcgtgcgttatcttcacagtgatatcgacaccgtcgaacgtatggagattatccgcgacttgcgtctgggtgagttcgacgtgctggtagggatcaacttactgcgcgaaggtctggatatgccggaagtgagcctggtggcgatcctcgacgctgacaaagaaggcttcctgcgttccgaacgtagcttgatccagaccattggtcgtgcggcacgtaacgttaacggtaaagcgattctctacggcgataagatcaccccaagtatggcgaaagcgattggcgaaaccgaacgtcgccgtgagaaacagcagaagtacaacgaggaacacggaattacgccgcaaggcttgaacaagaaagtggtcgatatcctggcgctggggcagaacattgccaaaaccaaagcgaagggcagaggaaaaagccgcccgattgttgagccggataatgtgccgatggatatgagccctaaagcgttgcagcagaaaatccatgagctggaagggttgatgatgcaacacgcgcagaatctggagttcgaagaagcggcgcaaattcgtgaccagttgcatcagctgcgtgagctgtttatcgcggcaagctaacaggatagcgaagaagactgatgacaaacggaaaacagcctgatgcgctacgcttatcaggcctacattttctccgcaatatattgaatttgcgcggtttgtaggccggataaggcgttcacgccgcatccggcataaacaacgcgcactttgtcttcaataggaagccggaattttccttcggatttccgttaacctaaagcctgtaacgccttttccagcgcgttatgtaacaactggcggtcatgacgatacggaatatcgctggcctccagtacctcctggatcacaatccgctctttcaccgcgctgacatccacttttggcccgacgatgaccgcatcaatgacctttttaccaacatactgctccataattgccagcttgctttccagcttcaaattagccgcaggtaaactcaactcacgccccagattgccgatataaaccatcggcgctggcgtgcggcgtaatgcctgggcgatttccttcagcagcagaattggcatcaggctggtataaaaactgccaggcccaataatgatgagatccgcttcattgatagcgtgaaccgcctcacgcgttgcgggtacattaggcgttaacaataactcttgaatcggcgtagttaactggtcgatattgacctcgccgtaaacttcatgcccctgatcgtcaatcgccatcagatcaacaggatgctcactcattggaatcaaatgcgtatccactttcagcagattacgaattaaattgatggcttccagaggccgcacgctaaggtgatccagcgcctttaacatcaagtttccgagattatgaccggaaagttcgccattgccaccaaaacggtattcaaacatcgcggaggcgacgctcggttccgttatcagctggttgaggcagttgcgcatatcgccccaggcaatgccgccttcactacggcgaatacgccccgtgctgccaccattatcggtggtggtgacgatacccgttaaacgagaacccaaagagctaagactactgagaacgcgtcccagtccatgccctccgccgagagcaacgacacgatcaagatcagccagcgtacgattgcgcatatagtttcctggagtcagattatccgcgctacagtagcgcaaattgcggggaaacagcaattaacctgccaatattgaggatacaaactattttcttctacctctaaaggacgatgcacgctatgcctccctgatgatgtatatcaaagtaaaaccgccattttcccttattctgtagcgaaatagcacgatcatgacgctatatacatgattacatagcgaaagtgtggatggtaaaaatctcatttacacgctagtatcggcataaccactaaacactctagcctctgcacctgggtcaactgatacggtgctttggccgtgacaatgctcgtaaagattgccaccagggcgaaggaagaaatgacttcgcctcccgtatctggaaaggtgtacatggctagtcaactgactgatgcatttgcgcgtaagttttactacttgcgcctgagcattaccgatgtgtgtaactttcgttgcacctactgcctgccggatggctacaaaccgagcggcgtcaccaataaaggctttcttaccgtcgatgaaattcgccgggttacgcgcgccttcgccagactgggcaccgaaaaagtgcgcctgacaggaggagagccgtctttacgccgcgactttaccgatatcatcgccgctgtgcgggaaaacgacgctatccgccagattgcggtcacaaccaatggttaccgtctggaacgcgatgtggcgagctggcgcgatgcgggacttactggcattaacgtcagtgtcgacagtctggacgcccgccagtttcacgctattaccgggcaggataaattcaaccaggtcatggcagggattgatgctgcatttgaggccggttttgagaaggtcaaagtcaataccgtgctgatgcgtgatgttaatcatcaccagctcgacacctttctgaactggatccagcatcgccctatccagctgcgtttcatcgaactgatggaaacgggcgagggcagcgagctcttccgtaagcatcacatctctggtcaggttctgcgtgacgagctactgcgtcgcggctggatccaccaattacgtcaacgcagcgacggtcccgcgcaagtcttttgccatccagattacgccggagagattggccttatcatgccgtatgaaaaagacttctgcgccacttgcaaccgcctgcgcgtttcctccattggtaaactccatctctgcctgtttggtgaaggcggcgttaacctgcgcgatctgctggaagacgatacccagcaacaggcgctggaagcgcgtattagtgcggcgctgcgggagaagaaacagacccatttcctgcatcaaaacaacaccggtattacgcaaaacttaagctacattggcggctaaaacgtcaaaaggagagatcagatgagtcaggtaagcactgaatttatcccgacccgtattgctattcttacggtttctaatcgtcgcggtgaagaagacgatacctccggtcactatctgcgcgatagcgcgcaagaagcgggccatcacgttgtcgataaagccattgtgaaagaaaaccgctacgctattcgcgctcaggtatctgcgtggatcgccagcgacgatgtacaagtggtattgattacgggtggtactggcctgacggaaggtgatcaggctcccgaagcattgctgccgttgttcgaccgtgaagttgaaggttttggtgaagtgttccggatgttgagctttgaagagattggcacttccacgttgcaatctcgtgcggtagcgggcgtcgccaacaaaacgctgattttcgccatgccgggtagcaccaaagcgtgccgtaccgcatgggaaaatatcatcgcgccgcagctggatgcccgtacgcgtccgtgtaatttccatccacatttgaagaaataagtatgagccaactgacccatatcaacgccgctggcgaagcgcacatggtggatgtctccgccaaagcggaaaccgtgcgtgaagcgcgggcggaagcctttgtcaccatgcgcagcgagacgctggcgatgattattgatggtcgccaccacaaaggcgacgtatttgccactgcgcgtattgccggtattcaggcggcaaaacgcacctgggatctgatcccgctctgtcatccgctgatgctcagcaaagttgaagtcaatttacaggccgagccggagcacaatcgggtgcgtatagaaaccttatgccgcctgaccgggaaaaccggtgtcgaaatggaagcattaaccgcggcctccgtggcggcgctgaccatttatgacatgtgcaaagcggtgcaaaaagatatggtgattggtccggtacgtttgctggcgaagagcggcggcaagagcggtgactttaaggtggaagcggatgattaaagttctttttttcgcccaggtgcgcgagttggtgggaacagatgcaaccgaagtggctgcggatttcccaactgttgaagcgttacgccagcacatggctgcgcagagcgatcgctgggcgctggcgctggaagatggcaaattactggctgccgtcaaccagacgctggtgagttttgaccatccgctgactgacggcgacgaagtagctttcttcccgccggtaaccggaggttaagatggcagaaaccaaaattgttgttggtccgcagccgttcagcgtaggagaagagtacccgtggctggcggagcgtgacgaagacggtgcggtagtcacctttactggtaaggtgcgcaaccataacctgggcgacagcgtcaacgcattaaccctcgaacactatccggggatgactgaaaaagcactggcagaaattgttgatgaagcgcgtaaccgctggccgctggggcgcgtcactgtgattcaccgcatcggggaattatggccgggcgatgaaatcgtttttgtcggtgtcaccagtgcgcatcgcagcagtgcgtttgaagccgggcagtttattatggattatctcaaaacccgcgcaccgttctggaagcgcgaagccacgccggaaggcgaccgctgggttgaagctcgggagagcgatcagcaggcggcaaaacgctggtaattttttgttagccggataaggcaccgctgcgtccggcaatttcaccgctcagtacatacgtttacgctgcgtcgatgcacagcctcatcattttgcagtatccttaagatattccttatatcttcaggagatcgtcatggacagattcccacgttctgatagtatcgtacaaccccgggctggcttgcaaacttatatggctcaagtctatggctggatgaccgttggcttgttgctgaccgcatttgttgcctggtatgcggctaattccgcggccgtgatggagctgttgttcactaaccgtgtctttttaatcggtctgatcatcgcgcaattagcattggttattgtgttaagtgcgatgattcaaaagctgagcgcaggtgtaacgacgatgctctttatgctttatagcgcgctgacgggtcttacgctttccagtatattcattgtctataccgctgcttctatcgccagtactttcgtcgttactgccgggatgttcggcgcaatgagcctgtacggttacaccacgaagcgcgatttaagtggctttggcaatatgctgtttatggcgttaatcggcattgtgctggcaagcctggtcaacttctggttgaaaagcgaagcattgatgtgggcagttacctacatcggcgtgattgtctttgtcggattgacggcgtatgacacgcagaaactgaaaaatatgggtgagcagattgatacccgcgacacgagcaacctgcgcaaatattccattcttggcgcgttaaccttgtatctggacttcatcaacctgttcctgatgttgttgcggatcttcggcaaccgccgttaattctttttcaccatcactatcccggccatgtgtcgggatttttttcttactaaaaacgacacttaacaagtaccaggtataaaatatgccttatggacgagcggaagcgttttctgtatccataaatgcaaaagtattttgtatgcgtggttttaaatttattgatggtgaatattaatattttttctaaggataactaaaagaatggaaagttacagccaaaacagcaataaattagattttcagcacgaggccaggatattaaacggtatatggctcattaccgctttaggtttggtggcaaccgcaggactagcctggggagctaagtatatcgaaattacggcaaccaaatatgatagtccaccaatgtatgtcgccatagggttattattactttgtatgtatggcttaagtaaggatatcaacaagataaatgccgccatcgcgggcgtaatatatctgtttttactctctttggtggcgattgtcgttgcaagtttagttcctgtatatgccattatcatcgtgttcagcactgcgggcgcgatgtttttaatcagtatgctggccggtttattatttaatgttgatcctggttctcaccgttttatcattatgatgacgttgacagggttggccctggtaatcatcgtgaatgcggcattaatgagtgaacggcccatttggataataagttgcttaatgattgtgttatggagtggcattatcagccatggacgaaataagctccttgaattggcggggaaatgccatagtgaagagttgtggagtccggttcgttgcgcttttacaggtgcattaacactctattactattttatcggcttctttgggatacttgccgcgatagctataacgcttgtctggcaaaggcatacgcgtttttttcattaaccgtaaatgcacatactaaagaacttaactaaacttcacatcgccgcttcatttttcgcccgtagcttcttcgcctggctttccagcaacaggtaacagatcagcgccagcagcagtgggataaagtaatacagcacacggtaagcgagtagggcggcgataattgtacctttggaggtatgctccccagccagtagtgcgataaacaccgcttccagcacaccgatccccgccggaatatgcacgatgacgccagcaatactactaaccagtaacacgcccagtacaaagaaatagttcacgctttgaccaagtaacagccagataatcgcccccattaccatccagttaacgctggaaatcagcatctgagcgagggcgaatttccaactaggcagcaccagcttttgccctttgatggtcatatggcggtgcttcgcgaaagcgcaaaaccacaaataaaccgcgataatcatcagtaagccaatgccgagaatacgcagcgtagtttgatcgacataccagtgatccggcaactccaccacgcctgcggtaaagataatccctgccagtaaaatgtagcccagccagttggtggtaatactgaggctgaaaatccgcgtaatagtgctaccgggcaaccccagacgagagtacaaacgatagcgcataccaatgccgccgacccaggtactgagcgtcaggttgaaggcgtagcagataaagctcaccagcatcacctggcgcttcgccagtttgtgaccgcagtaaaagcgggcgagcaggtcatagcagccgtaaatcagatagctgacgaccaccagcccgaccgcactaagcagcgcaacgcgattgtagtcgcggatgaccttccagacctcttcccagtccacttttttggcgtagaccaccagcaacacaatcaccgcgataaaaaacagccaggtgaggatcttctttgctaagcgccagcgcgggtgacttttactcatcagggttttacccccgtgttttcagtttctacccgatcctgcgtttccattgtcggttgtgcgggcggatcaacctgcgccagacgtggcgtgtgtgccggaagccagccaaccagcgccgggaagtggcgtaaaaagtggaacgccagcacgcttttggtcaggttccaccaggtgcgtttgggcagcatggtttcatccacctgctgacaatctgcggcaataatgccgttcagattatcgcgcagcgtctggttaaaatgacgatcgtggatgatgacatttgcttcgagattcagactcaaactgagcggatcgagattactggaccctactgtcgcccagtgatcgtccatcaatgccactttgccgtggagcgggcggcggcggtactcaaaaacctgaacgccgcctttaaccagatagttatacagcaagcgcgcaccgactctgacaatcggcatatccggttcgccctgaatgatcagtttgatccgcaccccgcgccgtgccgctttacgcaaggcgtgtaaaaatcgatagccggggaagaagtaggcgttggcgataatcacttcccgccgcgcctgagtgagcattttcaaataatggcgttcaatatcatcgcgatgttcttcgttatcgcgccagaccagcaatacctgcgcttctcccggctggcggttctcttccgctttgtgatgacgtcgccaccagcgtcgtgccgcgctctgtccaggcaggttttccagctcaaactggagaatatcttcgacaatcggcccttcaaggcgtaccgcgtaatcctgtttagcctctggaccgtagctggacatatgctcggcggagtaattcagcccgccaataaaggctatacgcgcgtcgatcaccacaattttgcgatgcatccggcgaaacacattggtgcgcataccaaaaaggcgagggcggggatcgtagtagcggaacactacgccagctgccgtcagttcattgacaaactcatcgctgagatccgggctaccgtagccatccagcaagacttccgctttaaccccgcgttgcgctgctgccagtagtgccgcatgcagttgtttgccgacgtcatcctcaaaccagataaacgtttcaagaatgatgcgttcttgtgcctcgccaatcgccttaaacaccgcgggataatattgctcgccgttttccagcaactggatcttattgccttcgcgccagctacatttcataaatgaatctccgcacttaaaggggcatgatcagaaaggtgtcgccatgtccgcagcggcaacgcggttggcgcgctggcgctggcatttttgacgtagatcctgtccagtcgtagtagaggaaattgcaccggaaacgtgcgcgccgggcgtccgtgggcgcgggtaaaaatctcatccagtccggcctgcacttttaacggatgattagctttttgccgccagtcattgaaatcacccgccaccaataccggttcgccgtccggtagctcattcacccattcggcgagcatcgcaagctgcgcctgacggtgcgcctcacgcaggcccagatgtacgcacatcacatgaatcgcttttccggtcatcggcggcacaatgcggcagtagagcacgccgcgcttttccgcaccatcgacgctaacatcgcgattctcataatgttcaatgggataacggctcagtacggcgttgccgtgatgcccttccgggtatacggcattgcgaccgtaggcaaaatcgctccacatagtgtcggcgagaaactcgtagtggctggtatcgggccagttttccacatgcagcggatgaacttcgtgcgcgcccatcacttcctgcaggcaaacaatatcggcgctgacggtacgcacggcgtcgcgaagttccggcaaaatgaagcgtcggttaaacgcggtaaagcctttgtgaatattgatggtgagcaccttgaagctaaattgttgtgtttgatcgggcataattttcctgtctttgcctcttatctcattgaaatagtgtagtcggcgtcacaaaaaggtgcggtcttacggaattttccgtaaagttcggtactctgagtaagtagagataaattcttcaggagagaagccatgaagtggcaacaacgtgttcgtgtcgcaacgggtctaagttgctggcagattatgttgcatttactggtagtggcgctgctggtggtgggctggatgagtaagactctggttcacgtcggcgtgggattatgcgcactgtattgtgtcacggtagtgatgatgctggtgtttcagcgccaccccgagcaacgctggcgtgaggtggcagacgtgctggaagagctgaccacgacctggtattttggcgcagcgctgattgtgctgtggctgttgtcccgcgttctggaaaacaactttttgctggcaattgcagggctggcaatccttgccggcccggcggtagtgtctttgctggcgaaagataagaagttacatcaccttacgtctaaacatcgcgtacgccgctgattacatcaccttacgtctaaacatcgcgtacgccgcactccctgtcgtggccgttatcaccagtagcggccacaaactattccacacaatatccagactcgcatccttcaaataaatctgcttggtaatgtccgtaaagtggcgaatagggttaatccacgtcaggttttgcagccataccggcatgttttccaccggagaaacgtaaccggaaaggagaatggcgggcatcataaagacaaacacgccgataaacgcctgctgttgtgtactacagagactactaatcaacagaccgaatcccaccaggcttaaaccataaatcaccatcgtaaagtagaacagcgccaggcttccggcgaaggggatttgatacgcccagataccaatcgccagcacaatggtggcctggaaggtggcgacaattaacgccggtacggctttgccgatgaagatctgccaggtggtgagcgggctaaccagtagctgatcgagcgtaccttgttcacgttcgcgggcgacggaaagactagtgacgatcattacgccgatagtggtgatcatggcgatcagactcggcaccacaaaccatttgtagtcgagattcgggttataccagttgcgtaccaccagctcgctgttgttaggtttcggttttccttccagcagctcctgctgataatttttgacgatctgttgcaggtagttggcggcaatttgcgcactgttggagttacgcccgtcgaggatcaactgcaaaggcgcggtctggaaggtatccagtttgcggctgaagtcagccgggaaacgcaccagtagtaacgccttttgtgtgtcgatggttgggcggatctcctgtgggcttttcagcagcagcacatgagtaaaggcgctggcgcgggcaaaacgttgggtcagctccacgctatgctcgccgttatcttcatcgtagatggcgatggtggcgttagtcacttccagcgtggcggcgaacgggaacaggatcacctgaattagcacgggtaaaatcagaatcgcgcgggtttgcggttcgcgcagcaagctctgcaactctttgcggattaacgtccataagcgatgaaacatgctcttctccttaatccagccgacgtttggttttcagccacgtcaggccgataaacatcaccgcgctagcgatcaaaaacagcacgtttaccaccagcaccactggaatattcccggcgaggaacaggctttgcagggtgctgacgaaataacgagcgggaataatgtacgtcaccgcgcggatcaccgcgggcatactgtcgatctgaaaaataaagccggaaagcataatgctcggcagaaaagcggcgttcagggcgacctgagcggcattgaactggttgcgggtaatcgtggaaatcagcagccccatccccagggtactgagtaaaaacaggctggagataaaaaacagaatcagcaggctcccgcgatacggcacgccgagaataaacacactcaccagcatacacagcaacatcgccagcatcccgagaaagtaataagggatcagcttacacagcagcagttccgtgcgggtaatctccgtagagagcagagcctccatggtgccgcgttcccattctcgcgccaccaccaggctggtgagaatcgcgccgatgaccgtcatgataatggtcaccgcaccggggataatgaagtgctggctaatcgccgccgggttaaaccagtagcgggtttgtacatcaataagcggttcaaaagtctgcccgttgtcctccgctcgctgcatttgccagatctgccagatcccttcgacatacccctgtacaaagttagcggtattcggctcactgccgtcggtgatcacctgaatcggtgcggtggcgttggcgcgctccatctgttccgcaaaatccaccggaataaccaccagaccgcgaattttccccgcctgcattttggcgatcagttcctgacggttatcgctgatggtggcgtcgatgtaggggctaccggtcatggtgtgggtgaaatccagcgccgcttcgctacgctgttccagtaaaatcccgacccgcagcttgctggagtcgaggttaatgccgtaaccaaaaataaacagcagtagcagcgggatcactaccgcaatcagccagctactcggatcgcgaacgatctgccgcgtctctttaacgcacagcgcccgtacgcgacgccaggacaggatcgggttactcattgctatgctccttatcccagtcgtggatcaactgaataaaggcttgctccatggtgggatcgggttgctcatcgttagcgctctgtgctttcaaatcgtccggcgtgccgctggcgattaatttcccgcggtacaccaggccgatgcggtcgcaatattccgcttcatccataaagtgggtggtgaccatcaccgtgacgcctttctctaccatgctgttgatgtgcagccaaaattcacggcgggtgagggggtcaacgccggaagtcggttcgtcgagaaacagaatgtccggttcatgcatcaggctacaggccagcgccagccgctgtttaaaacctaatggcagttcatcggtggcgtgggaggcgatacttttcaggccgaacgcctcgctcatgcgggagattttttcgttctgcgcccgaccgcgtaagccatacacaccagagaaaaagcgtaaattctgttcgaccgtcaggttaccgtagaggctaaatttttgcgccatatagccgagatgctggcgcgctttaccggaactctctttcagatccatccccagcaccagcgcctggccggaagtcggcaccagcaaaccgcacatcatcttaaaggtggtgcttttacccgcgccgtttggccccagcaaaccaaaaatctccccacgtttaacggcaaagttgacgtgatcggtggcggcaaaatccccaaatttcttggtcagttctttcgcttcgatcaccgtctcgccgggtgtgccttctaccgtatgtaatattgcgcccagcgggctttcgctggttccggcaccgcccagcaaatcaataaacgcatcttcaaaacgcggcgtagtttcgttgatgttgatttccggcatcccgtcggcatggcgaatatcgtctggtgtggcctcttttttgaggatcagacgtacgcttttcccctgaatcatgccgtcgctgacctgcggcagtttcaaggcgcgttgcaacagtttgcggttgccctcgtgtggactggtcatcagaaagctgcgtccggccatggtttgtgtcagggcttttggttctccctgatacagcaactcgccttcgttcatcagtaacacgtcacggcactgctcggcttcgtcgagatagctggtactccagaggattaacatcccttcgcccgccagctcatgcaccatctgccacagttcgcgccgactgatagggtcaacgccgacgccgggttcatcgagcagcaacactttcggttcgcccaccagggtacaggccagaccgagtttttgtttcatcccaccggagagcttgcccgccaggcgtccggtaaacggcccaagagacgtaaactccagcaggcgagcaaaagtttgcttacgtgcctcgccggtgacgctgcgcaaatccgcgtacagattgaggttctccatcaccgtgagatcttcatacagaccaaatttctgcggcatataaccgagcacggcgtgcagcgcgccgtcgtttttgatcggatcaaagccaatcaccgtggcactgccgctgtcgggtttcagtaatcccgccaacatccgcatcagcgtggttttacctgcaccgtccggccccaccaaccccgtcacataaccggcgtgaatggtacaatcgagcggcgcgacggcgggcttgtccatgcccggaaagcgtttttccaggccgttcagcgtgataacggcatcattcatgtcctgcctcgtcaccgaattgtaccgtcactggcattccctggcgtaacgcatcatcggcgtcggtcaccacaatacgcaggcgatagacgaggtcggtacgcagatccggcgtttcgacggttttcggggtaaattcagcagtcgggctaacgaaaccaatctgcccgtgatacggcttgtccgggcgaccatcggtataaagcagcactttgcgccccggctgggcctggtcaagattacgttcatcaacataagcgcgcacccacaccggacgcgttagactaacggtaaacaccgtgccaccttcattgaggaccgtgcctggctccaccgcgcgcgttaacagcgtgccatcagacggggctatcaacgtactgtcctgtaaattcaactccgcctgcgccagttgcgcctgcgcctgttcgaggctggctttcgcctgagcgatgtcctgttcacggttaccggaacggtactgacgcaatttatcctgtgcacttttcagcgttgcctgcgcctggtcgcggctggagcgggcattttccaggtcatttgcgctaatagtgcggcttttccacaacccttgctggcggttatagaagttctgcgcatagtcataggcggcttgcgcctgtttcaccgctgcggcggcctgagcgatttcttcattgcgatacccggcaagcatcaggtcatactgcgcctgtgccacgctaacacccgctttcgcctgcatcagggcaatctcatacggcttgtgatccagttcgcccagcacctggcccgctttgatagcatcaccttcgtccaccgccaggctttcaacgcgccccccaacacggaaactaagatttaccgtacgaatatccacgttgccatacagcgtcaggccgttatcctggcggctttgataccaccagtagcctccggcaaccacggcggcaagtaccactaccgccaatccgatcacgacaggttttttcatcactacaaactcctttgcgataattacaaactcctttggcttaatccttgcaaaatcaggtcgatatgacaggtcaccgtctggttgatcagttcggtcttttcttcatcgaacgcggtccagccggtacgtaacagaattgtttctttgccaagacggaacgccagaatctcaccaatcaacgcatgggtatgaaggatcatgcgggtgtcattggcgtcgcagccggtccaggcggcaatcaggcgtgtcaggtggctgtgtagcggactaatcacctgttcgtgcaccaggtggtaggctgccgtgggagagagctgctcacgggagataaacttgctgaggttgacggtgtcatcctgggtgagcagcttaatcatgttcctgcaggcgcgaaggatcagttcacggatggcagcccgatcaggctgtggttgcgcgaacaagcgttcggcttcctcggcatgcggacggaactgctcgccaataaaatcggcaatccactgggcgcaggcgaggtacaaatcttctttgctaccgaagtagtaggtgatggcagcgatattctgcccggcctgggcggctatctcgcgagtggtggcgttcattccatattcaccaaactgcgccagtgcggcagcaatcagctgttttttcgcctgttcacccttgattgtcatggcaggattattcatcgcacagtccattcttaatcaaatgattgattaagattatgactccataggggagttgtccagtatggctaagaattttagcaacgccagtcacagggataatttatgcgctgcgtcacaaaaactgctacactccgctccctcatgacattgtggtttttgtcattttccttttcagtatctccctgaaaactacaccggtaacggtcggggcggttcggagtagttatgtctttcgattctttgggtttaagccctgatatcctgcgcgccgttgccgagcagggttaccgtgaacccacccctattcagcagcaggcgatccctgcggtgctggaaggccgcgacctgatggctagcgcccagaccggcaccggcaaaacagcgggctttacgctgccgctgttgcaacacctgatcactcgccagccgcacgccaaagggcgtcgtccggtacgtgcgctcattcttaccccgacccgtgaactggcggcgcagattggcgaaaacgtccgtgattacagcaaatacctgaacattcgtagcctggtggtgtttggtggtgtgagtattaacccgcagatgatgaaactgcgtggcggcgttgatgtgctggtggcaaccccgggacgtttgctggacctggaacatcagaatgcagtgaagctggatcaggttgaaatcctcgtcctcgatgaagctgaccgcatgctcgacatgggctttatccacgatatccgtcgcgtgttaacaaaactacctgcgaagcgccagaacctgttattctccgcgaccttctctgacgatattaaagccctggcggaaaaactgttgcacaacccgctggaaatcgaagtggcacgccgcaataccgcgtctgatcaggtgacccagcacgttcactttgtcgataagaaacgcaaacgcgaattgctgagccacatgattgggaaagggaactggcagcaggtgctggtgtttacccgtaccaaacacggcgctaaccatctggctgaacagctcaataaagatggcatccgtagtgcggcgatccacggcaataaaagccaaggtgcgcgtactcgtgcgctggctgattttaaaagcggcgatattcgtgtactggtggcaactgacatcgctgcgcgcggcctggatattgaagagctgccgcacgtcgtcaactatgaactgccaaacgtacctgaagattatgtccaccgtatcgggcgtaccggtcgtgcggctgctaccggtgaagcgttgagcctggtgtgtgttgatgaacacaaactgctgcgtgatatcgaaaaactgctgaaaaaagagatcccgcgcattgcgattccgggctatgagccggacccgagtatcaaagccgaaccgatccagaacggtcgccagcaacgtggcggcggcggtcgtgggcaaggtggtggtcgcggtcaacagcaaccacgccgtggggaaggtggcgcaaaatctgcaagcgcgaaacctgcagaaaaaccgtctcgccgcctcggcgatgccaaaccggcaggcgaacaacaacgtcgccgccgtccgcgtaaacctgccgctgcgcagtaatcttttatgccgggctatgcccggcatcaggctgatgaacaaacgcaaaactgcctgatgcgctacgcttatcaggcctacgtgaactctgcaatatattgaatttgcatgcttttgtaggccggataaggcgtttacgccgcatccggcatttcacaacaagcacttgtcagcaatttgagaacacgggaaaaaatttatctgttttaccgcccataagccaccgagacgttacttctctatagccaattgttcgcgcaactccattaaaaggtagcccagtcgattcttgcccttaccatgaccaccgtctccccagtaagcatcgttttccgtatgctcaaccagttttgcgggcgcggttgccagcaagagcgcacgcagttctgcatgctgttcgaatttagcgcgaagtgcttttcgcatcacctgttctttgacgctctcccagtttttacgcagaggcttagaacgatcgcgccccatgcgtgcggcgaccataggggaagaaacccgacggatctcttcgcggtatttttcatcaaggaatttttgtgcctgaaaatagtgttcactggtaggccaggttttcccgtcaaccttgatgggccaggcggcaaagttagaaaaatcaccgtagtcatcgctggtgctgtagaaatttatgatggtgtcttgcatgacgtgttggatcctttgtgctcgaacgggcattaaaccgcattatgttggtggttattgcgagccgctttccagaaacagaaaaaccattacccctgaaaaccgaaaaatgccacaatattggctgtttatacagtatttcaggttttctcatggcattaaccgccgcgcttaaagcgcaaattgccgcctggtataaggcgcttcaggaacagatccccgactttattccccgtgcgccgcagcggcagatgattgcggacgtcgccaaaacgctggccggagaagaagggcgacatctggcgattgaagcccccaccggcgttgggaaaacgctctcttatttgattcccggcatcgccattgcccgcgaagagcaaaaaacgctggtggtgagtaccgccaacgtggcattgcaggatcagatttacagcaaagatttaccgctgctgaaaaagatcattcccgatcttaaattcactgccgcttttgggcgtgggcgctacgtttgtccgcgtaatctgacggcgctcgccagtactgaacccacgcaacaggatctgctggcgtttcttgacgacgaactgacgccgaacaatcaggaagagcaaaaacgttgtgcgaagctgaagggcgatctcgatacttataaatgggatggtctgcgcgatcatactgatatcgctatagatgacgatctctggcgtcgtttaagtaccgacaaagccagctgcctcaaccgcaattgttactactatcgtgaatgcccgttttttgtcgctcgtcgggagattcaggaagcggaagtggtggtggcaaaccatgcgctggtgatggcggcgatggaaagcgaagcggtattgcctgacccgaaaaatttactgctggtgctggacgaaggccatcacctgccggatgtggcgcgggatgcgcttgagatgagcgccgaaatcaccgcgccgtggtatcggctacagctggacttgttcacgaaactggtcgctacctgcatggagcagtttcgcccgaagaccatcccaccgctggcgatccctgaacgtttgaatgcgcattgtgaagagttgtatgagcttatcgccagcttaaacaacattctcaatctctacatgcctgccgggcaggaggcagagcaccgttttgcgatgggcgaactgccagatgaagtgctggagatctgccagcggctggcaaaactcaccgagatgctgcgtggcctggcggagttatttcttaacgatttaagtgagaaaaccggcagccatgacattgtacgtctgcatcggttgattttgcagatgaaccgcgcgttggggatgttcgaggcgcaaagcaaactctggcggctggctagcctggcgcaatcttccggtgcaccggtgaccaaatgggcgacgcgggaagagcgcgaagggcagctacacctctggtttcactgcgtgggaatacgtgtcagcgatcagctggaaaggctgctgtggcgcagtattccgcacattattgtcacctccgcaaccttgcgtagcctgaacagttttagccgtttgcaggagatgagtggtctgaaagagaaagcgggcgaccgttttgtggcgctggattccccctttaaccactgcgaacagggcaaaattgttattccccggatgcgcgttgagccttccatcgacaacgaagagcagcatattgccgaaatggcggcctttttccgtaagcaggtggagagcaaaaaacatctcggtatgttggtactgtttgccagcggacgggcgatgcagcgctttctcgactatgtgacggatttacgtctgatgttgctggttcagggcgatcagccgcgttaccgtttagttgaactgcaccgcaaacgcgtcgccaacggtgagcgcagcgtgctggtgggcttacagagttttgccgaagggcttgatttgaaaggtgatctgctcagccaggtgcatatccacaaaatcgcttttccgcccatcgacagcccggtggtgatcaccgaaggggaatggctgaaaagcctcaaccgctatccgtttgaggtgcaaagcctgccgagcgccagctttaacctgattcagcaggttgggcgactgattcgaagccacggttgctggggcgaagtggttatctacgacaaacgcttgctgaccaaaaattatggcaagcgactactggatgcattaccggtatttccgatagagcaaccggaagtccctgaaggtatagttaaaaagaaagaaaaaacgaaatccccacgccgtcggcggcgttaatgatgtgagtcaggtaaggagtcgtaaatggactatcgcaaaatcattaaagagatcgggcgcgggaaaaaccacgcgcgcgatttagaccgggatactgcgcgcggtctgtatgctcatatgctcaatggtgaagtccctgaccttgagttgggcggcgtattgattgcgctgcgtatcaaaggagaaggggaagcagagatgctcggcttttacgaagccatgcaaaatcacaccatcaagctgacgccgccagcaggcaagccgatgccgattgtcatccccagttacaacggcgcgcgtaaacaggccaacctgacgccgttgttggcgattctcctgcacaaactcggttttcctgtggtggttcacggggttagcgaagatccaacccgcgtgctgactgaaaccatttttgaattgatgggtattacgccaacgttgcacggcgggcaggcgcaggcgaagctcgacgaacatcaaccggtgtttatgccagtcggcgcgttttgcccgccgctggaaaaacaactggcgatgcgctggcggatgggcgtgcgtaacagtgcacataccctggcgaaactggcgacgccatttgccgaaggtgaggcgctgcgtctttccagcgttagccatccggaatacattggacgcgtcgcgaagttctttagcgatatcggcgggcgggcgctactaatgcatggtactgaaggtgaagtgtatgctaatccgcagcgctgcccgcagatcaatctcattgaccgtgaagggatgcgggtgctgtatgaaaaacaggacactgctggtagcgagttactgccacaagcaaaagatccggaaaccacggcgcagtggattgagcgttgccttgctggcagcgaaccgattcccgaaagcctgaaaatccagatggcttgctgcctggtggctacgggtgaagcggcaactatcagcgacggcctggcgcgcgttaatcaggcattttaattcttttctcagccggatgagccatgtcatccggcttttaccccaccgcaatatgaaattcctgcatctttattgaccttcccacgcccggcgtgcagcataaaaatacaacaaacacataacataaacaggagttaaccatggaaagtggtcatcgctttgatgctcagacgctgcacagttttattcaggctgtatttcgtcagatgggtagcgaggaacaagaagcgaaattagttgccgatcatttaatcgcggcaaacctggcagggcatgatagtcatggtattggcatgatcccaagctatgtacgctcctggagtcaggggcacctgcaaattaaccatcatgccaaaaccgttaaagaggcgggggcggcggtcacgctcgatggcgatcgcgcatttggtcaggtcgcggcacatgaagcgatggcgctggggattgagaaagcgcatcagcacggtattgccgccgtggcgctacataacagccatcatatcggccgtatcggttactgggcggagcagtgtgcagcggcggggtttgtctctatccactttgttagcgtggtcggtattccaatggtcgcgccgttccacggtcgcgacagccgctttggcaccaatccgttctgtgtggttttccctcgtaaagataatttcccgctgttgcttgattacgccaccagcgccattgcatttggcaaaacccgcgtcgcctggcataaaggcgtccccgtgccgccaggttgcctgattgacgttaacggcgtgccgacgaccaatccggcggtaatgcaggagagcccgttgggtagcctgttgacctttgccgaacataaaggctacgcccttgcagcgatgtgtgaaattcttggcggggcgctttccggcggtaaaacgacgcatcaggaaacgttacaaaccagtcccgatgccattcttaactgcatgaccactatcatcatcaacccggaactcttcggcgcgccggattgtaacgcgcagaccgaagcctttgccgagtgggtgaaagccagcccgcatgatgatgataagccgattttgctaccgggcgagtgggaagtgaacacgcgtcgcgaacggcagaagcaggggattccactggatgcgggaagctggcaggccatttgtgatgcagcgcggcagattggtatgccggaagagacgttgcaggctttctgtcagcagttagccagctaaaaaaaaagcccgtccagtggcggacgggcaaacaagggtaacataggatcaatgagggttagagcatatgcgtctgtcggcaaacagacagggaaatacttgtgctggacgtagcgtaaacgcctgatccgtccaacggttcggattttgtaggcctgataagacgcggtagcgtcgcatcaggcatctgttgccggatgcggcgtaaacgccttatccgtcctacgaattacttataaattaccgcagtaccgcttaatttattgttgttggtggcggaagtgatgctgtatccactggcaccggctgccgcggctttctcagccagtttcgcttccagggcatcgagggtggatgcgccatcggcagaaaccacgccgattttattcatgttctgtgcctgggatgccgttaccggttccgccgcgaacacgccaaaactcagagtactaagagccatagcagcaacaacagtattgatagttttcataattaatctctcgcaggtgatttttgtataagtgacgttgtttcgtcgatgtgatgagtatcacgtttttttacgagagataaaatcgaagagaattgaccgccttgttcaaataaattgattgatatctaacctactgataaaccatttatttgttgtacttatgaacttgttttataccgcgtggcagtcacagcagcgttaaaggcacggaatgacacgcaaaatacaaattatactcgctatgcatctcgccagttgtagttaacgtaactggctgtctttgctacctctgcgattatatcctgtataagctggtttttgtaaatctttctcctgctgacaatgaatacataagcgcacgccaggaatggcttcccgacgggcctgcgggatgggggcaccgcactcttcacattcatccaggctttcgccgcgcggaatttcaccccgagcgcgggcaatcgcatcttcaattgtactgttgatctgttcgttgacggcgtcatcgttagcccaaccggatgccatatcgacctccccatatcaatacttgtacagttaagtgtagctaatccagggacgaactcgggcagttcaagcatcagatctcgctccattcccgcagcagattatgataaagattaagcaggctcaggatctcttcactttcgccgtagcggcttttcaggctctgaatattgttgtccagttcaaacagcatggcgcgctttttatcatcgcggatcatgctctggatccacataaaacttgccactcgtacgccgcgggttacgggtgtcacgcaatgcaggctgctggagggatacaacacgagatcgcctgccgggagttttacccgatgttgtccgaaggtgtcattaacgaccagttcgccgccgtcgtagctttgtggatcgcttaaaaacagcgtggcagaaaggtcagtacgcatccagccgttttgtggatggctgcgtactgcgccatccacatggaaaccataggtttcattgttctgatagcgattaaacagcggcgtggaaagggtacgcggcaaggccgcggcaaagaataaagcatgttggttaaccgcgttcagcacctcattttgcagggcggcgtataacgtgctgcgggtgtcgacctgttgattgttcttaacttgcgcaccttgtgcgccggtggtgacgcgtccatccacccattcggcttgttccagttgttcgcgaaaacgagcgacgtcctgtgggcttaacacgccgggaatgtggtacatcatacaatttctccaaaaagtggggcctgcgccccacatctgaatcagaaatgcatattggctgtgagcaagaaggttcttggctcgcccgggtgataacggtagccgctcttgttgatactggcgacgtaatcggtatcaaacaggttgtaaacgtttagctggaagtcgagattgcgattaactcgataccccagtttggcatcggcgacccagtaaccttcggtaaacgctggcgttcccaccgcgccgtcactacctttatgcatactgccgatatagcgtgcgcccgcgccaacagagatatcgtcggttgcctgatattggctccataaggtgaaggcgtgctccggggtatacggcaggctactggaaccatcctgggcaacatctttgccgtttttgatggttgctttttgctgggtatagccgccaatcacctgccacgcgggagtgatattcccggccacggatatctcatagccttcgacgcgtttcttaccgtattggctgtaagttccgtcatcattttgctcaacttcattttcgatatcagtgcggaacagcgcggcggtgagcaacagacgtttatccagaacctgccatttggtgccaatctcgctggtgttggctttttgcggtttaaaatcggtgcggttggcactgttaccgctgccagactgcgcaagggcgaagttgttgccgcccggaggctgctgggaaacggcatagttaatatagacattgccgttttccgtcaggtgatacagcgccccggctttccagttcatcagattgccgctcttggcggtgtcgacggtggtgaccggagaaccttttgccacaccagttgggcaggtgatggcaccgcgtccgctgccgccgcaggcggtggcactgtcatattcagtatgataattatccagacggatcccgccgttcagctcaaaatcacgggtgatttgcagcgtatcaaaggcgtaaattgcgaaggtatccgtctgaccattggcgtttgcgccgttgcgcgtcaggccgccgggatgaatgctgctgtcaggatgataaatatttaccgcgggtaacgtcaccggattaacgccgtagttagtctgcgtttcacgggtaaattccacgccggtactgacatcatgaccgatagaaccggtatagaacgtgctggtcaggttggtctggttggtgagaattttattactcacatctttggtattcgccgtgcgactccaggtccagctattcacatcgctggtgggctgagtaatattgctcgccccgcccataatcgccgtcatcaggtaatcctgctttacgcggctccaacgggtagtattgcgaatggtggtgttatcgttgatgtcgtgctcaaaacgcatggtggcggtgtcggtggtgctatcgtcgtaatcggaatccgtgccgtaaaagttatgagtatcaacttttccggaatgattcagggccgccgttcccgcagatggggcagaatagcccggcaaaccgatggtcggaatgccgccgtctggcgtgttgtgctgggtgacatgcagataattaagatacaaacgattcgctgtaccaaggccaaaagcgacagaaggggcgacgccgtaacgctcatttttgactttgtcgcgtccggcatcgtgcgttttttcgcccattacattcaggcgcaccgcggtggtatcaccaatgacctgattgacgtccagcgtgccgcggcggaaccaggcgctgccaatactggcggaggcgtcaatgccggaatcattgcgcggctgcttgctgatcatattgatgctgcctgtcggtgcgctgcgcccgtagtcggtgccggacggccctttaatcacttcgacctgctcggtattgaaggtgtcgcggctgacgctgccgatatcgcgaatgccatcaatataaatactgttagaggtatcggcaccacgcatataaatggcgtcgccagtggtggagttaccgttctcacccgcaaaaaacgcacccacgccggggacgtttttgagcgcgtcggtaaggttggttgcgccctgatctttaatcacttgttcagaaattaccgtcatcgtgcgggtagtatccgctaccggacggctgaatttcggatcggcagattgttgtggcgcataaaggctaggcgtacttgcttcgacaaccagcgtgtcatccgcgttagtttgcccttcggcggcgagtgcctgagccacaggcgtgatgccaatacaaagaccggcaaagaacgtgaggctatgaaattgtctggcagggaaattgcgattgttttccattttgcaggtgactttttcttatatgttgaaattttcactgccacgagaaagcctctctgcggatgcgatgccactgttaatcccgtgatagtgctcgtgaaagtgataataattttgataagcattatcacttggagcgattttctatcacccattgcgcgaaaaagaaatacatttatttacattgagttcatatttgatgttttttgattacaaaacagacgaaaactgcatccagaggcgaatgcagttacgttggtggggttatttgtagatggttgcagtaccgaacatctggtcatttccgcctgcggaattaatgacataacctttcgcgccttgttcgcgcgctttttctgccagtttatcctccagatcgcttaggttacttgcgccagttgcgctaacggtaccggcgggccgtagctgaccgctgtccaggttactcatcggttgcgcggcataagccgtgagagagattccgctcaggacggtggcaatcagtagtgtgaggcactttttcataatgacatcctcataaatacaacgggtagtgcctgataagtgtaggtcgcctgcgcgatgcaaatgacgcaaaaaattgacagagatgtgcttattttttgaacgatatatttttacaaaataagacaaatcaatgacatgcataatgctgatttttatgatgaattgccataaaccatagccatgttaaggttttggggaatgataaacgcagccagatatttaccctgtcgcgttatgcgggtatcttacgccgctgcttaaaggagaatgctatgtccgcccagaaaccggggttgcatccgcgcaaccgtcatcacagccgctacgatctcgccacgctttgtcaggtcaatcctgaactcaggcaattcctcacgcttacacccgccggggagcaaagcgtagactttgccaatccgctggcggtgaaggcgctcaataaggcgttgctggcccatttttacgccgtagcgaactgggatatccccgacggttttctctgcccaccagtaccgggccgggcggattatattcatcaccttgccgatttactggcagaagcaagcggaacaattccagcgaatgccagcattctggatatcggcgttggtgcgaactgtatttatccgctgattggcgtacatgaatatggctggcgttttaccggtagtgaaaccagcagccaggcgttaagcagtgcgcaggcgattatcagttctaatccggggcttaaccgcgccattcgtctgcgtcggcaaaaagagagtggggcgatttttaacggcatcatccataaaaacgagcaatacgacgcgaccttgtgtaacccgccattccacgattccgccgctgcggcacgggcaggtagtgagcgtaaacgccgtaacctggggctgaacaaagacgatgcactgaactttggcggccagcaacaggagttgtggtgtgaaggcggtgaagtcacctttatcaaaaagatgattgaagagagcaaaggcttcgcgaagcaggtgatgtggtttacaagtctggtatctcgtggtgaaaacttaccgccgttgtatcgtgccctgacggacgtgggcgcggtgaaggtggttaaaaaagagatggcccaggggcaaaagcagagtcgctttattgcctggacctttatgaacgacgagcagcgccgccgttttgtcaatcgccagcgttaaagcgttggttcccccggcggtaacggttcagccggggtcgcgcccggagcaggcagcacctgataagtctgcactggcgcgcgaacgcccgccaggtcgaaatgttttttcacctggctgtcgagggcaaagcgtaccgtccactgtttgagtggcagcgtggtgaagctaacacgcagtgtaaacgcggtattgcttaagccgacaatcccggcaaaattcggttcaccaataatcagcccgcgaatttcttcgttttccattaattccgctaccgcatctttcagtgcctgattggctttatcagcatcttcatggcgatcaacatcataatttgccaccacgctaccaatgccgcggacaaagttagcaaaggtggttatgctagaccacggaatgatgtgatacgccccggtatcctgtcgtacgcccacggagcgaatgctcatccgttccactgtgccggtcaacggcccgatagtcaccaaatctccagtgttcatgccgttttcaaactgaataaataccccggtgataatatctttcaccagcgtttggctaccaaagctgatagccagacctaatgccccggcacctgccagcaatggcgcgatattgacgccgatttcgctcaacacaatcatgatggtgatggtactgataatcaccgccagcgcgttacgaaacagcgtaagcagggtacgcgtgcgggcgctgggtagcgggcggccatgaatatcgctagccagccggttttcgatcaaactggcgagcaccgtccagccaaccgcgctgaagaaaagaatgagtgcgatacggatcaggatatctacggttttctgccccgcgccgttttgcagccagttccagaaatcgaacaatccccatgcgctcaacagcaacattaccgccacgcagactgtcagaatacgcgccgttttcagcgccgcgctcagccagccattcaaccgtttttgcagctccggatagttacgctgagtatgtgggctgagagtgatggttttcgccagccagcgggaaaacataccggaaacaaacgctgcgataccaataatcgccaggctgcgcaccgttgcacccatcataaatttcaggctgttgcccggatcgaacaagctaaagaaaaacagcacgataaaataggcgcttgccagccagtgccacaccagcgcaaaggcgcggataaacaggctgaaaaaggccaggctatgctccgcgaagttgagcaaatgctgggtaatctcttttttattacgaaagatcaggtacaacgcccagacggtcatgcacagcataatgatgacgttcgccagcgcacctatctgtacattcacctgattagagataatcggcacggccacaatcaggccataacctatcaaactgcttaaccagctcaggcgacgactccagtaacgggcgctctcgtcctgaatcgtgaacgggcgcagctccgccacgtttgggcaaaaaatcaggcgtagtacggctttgaaaaattcaatgagggcaaaggcgttgagaaacaaactttgttggaaagcgatggtgcgactgcctgcattcaggttgtcgcttaatacctggccgacaaataatgtcagggccagtaacagcaggtcgataataaacgccccgataatcatcgccggaagctgcaaccagttactgcgctcacgatttttttgccgcgcccactgacccattttgcgatacagcggcagtgcgcacaggcgaatcagccagtaaaaaccaaacactaataccgctaacatactaaaatgggtcagcgcattgctgaaggtttgtggattaaacggcttatgcggggagccggtgatattgcgataaagttgcccgaagcgggcggaaagggcttcaccataatggcggctgacttcggtgaccttttgcagcacggtttgctcttcgaccagcgtcggcggcactatttttggtaccggttcagcagggggcgtagcggcaacggtgcgcaactggtcgatcaactctttacggctggtgtcattatccagcacatccgccagtgcgccataggccgcttttttttgttcgatatccggttccggggccggttcagtcgtactgtccgttgtcgttgtggttgtaacgccgggtatggataccgcgtgggcaggtgcgcccagcaggcagaagaggatgaacaggatccaccgcatgactcctccagtgagaaaatagagcaaaaagataagtatagatgctggaggaggggcgattttaaatgagaggaatctggtgtgcctccctttcgggtgaaagggaggaagggatattaagcaggttgctgacaacgtgcgggcttttttgccggatgcggcgtgaacgccttatccgtcctacaagttcatgcaattttaataagttgccagatatcctgtaggcctgataagcgtagcgcatcaggcaatgtgtcttattaagagacgtgctgcaaaaattcctgcaagcgctggctcggcgggttcttgatcaacacctgcggattgccatcttccgcaatccggcctttgtcgataaagatcagccggctagctactttctcggcaaaaccgatttcgtgggtcacgatcaccatcgtcatcccttcttcagccagatcctgcataaccttcagcacttcatggcgcagttccgggtcaagagcggaagtcggttcatcaaacagcatcattttcggcttcaccgccagcgcgcgggcaatcgccacacgctgctgttgaccaccagaaagttcggaagggtagtgatgtgcacgttctgccagaccgactttcgccagcagctcacgtgccagtttttccgcctcttctttgttcgcgccacgcacgcgtagcgggccaaacatgacgttttccagcgctgtcagatgcgggaagaggtaaaactgctggaacaccatacctgcttcctggcgaatcaggcgctcgtcaactttcggatcgttaaccttcaggccatcgacaatcagatcgccggaggtgatttcttccagtttgttgatgcagcgcagcagggtgcttttaccggaaccggacggcccgataatcaccacgacttcgccctgggcaatgttcaaatcgatattgtgcagcacctgggttgggccaaagtgcttggagacgtttttaaattcaatcacaggattttcatccttctttccagacgacgcagaataaagctcagcaccagggtaataatcagatagaacaccgccacggcgctccagatctcaagggcgcggaagttaccggcaataatttcttgcccctgacgggtcagttccgccacgccgatcacaataaacaggctggtgtctttaatgctgatgatccactggttacccagcggcggcagcatacgacgcagtgccagcggtaaaatgacgtagcgaatggtttcccaacgactaagaccgagcgccagtcctgcttcacgaaaacctttgtggatagacagcaccgcaccacgcgtgatttccgcaatatacgcgccggagttgatcatgatggtgaccaccgccgcagtaaatgggtcgatgcgtaagtcgttaaacgccatcggcagggcgaaataaataaacatcacctggacgacgataggtgtgccgcggatcacttcaataaagaccagcgcgacgtggttggctatccaacctccgaaggtgcgtgcaaaacctgccagcaatccgattaccagaccgcctgccagaccgaggacgctaatccacagggtcattttggcaccttcaatcagaagcggaatggcaggccagatggcactccagtcaaactgcatatgttgttcctgttaccgtggtgtaaataatcaaattcagggtaattaatggccccggagcgggtttgcgcccctcaccctaatcctctccccataggggagagggaactgccagtgcgttttacaggtgtagcgttattatttcggttcagtaccgaaccattttttgtagatttcgttgtaagttccgttctcgcgcagggttttcaacgcgccgttgactttgtcacgcagctcgtcgctacctttcgggaacgcaataccgtattgctgcgcttccagagagtcacctaccgctttgaactgaccgttaccggcggttttgatgaagtacagaatgtttggcgtatcgtgcagaacggcgtctgcgcggttggtgcccagttccatataggcgttatcgatgttcgggaactgacgcagatctttagttttgatgtttgctttcgcgtaatcaacggagccagtaccgctcttcacagcaaccactttcccgtcgagatctttcacgcttttcacatcgttattgttagctttcaccatcactaacaggccgcttttgtagtagccgtcagagaaatcgatcgcttttttacgctcgtcggtgatggtaatgcccgccagcgccagatcgacgtttttggtttgcagtgccggaatgatcccactgaaatccatcggcttcagttcgtaatccagcttcagctctttagcgatggcagcccacagatcaacgtcaaagcccacatatttatcgccctgtttaaattcaaacggaacgaaggcggtatccgtcgcgacaactaattttttatccgcggcatgagaagaaaccgcaaaagccagggtcagtgcagccagactaacttttaatacagacttcatagcatttccttttttctatccacgggacgatcccctgcgtgacattcacatatatgaaaaaatcgtgccagttttgcaactccttgatttttcgagatgcggcaaaaacgtgatgcacgatttatagggcaataccctgaagatgcaccattctggggcaccaatctggtgcgctaaaattgtgcactcaacacagtgattatttagcgtaaaacctgatgaaaaaacaatctttatgtaacgattgtgtgatgatgtggatacaaaaaatttacttaatcagctggagatagcagatggatgcactaaataagtgcgttgaggtgggctgcaaaacaaaacggcctcctgtcaggaagccgcttttatcgggtactaaagttctgcaccatcagcgatggatttattcgatgttagactcgataaaccacaggaatttatccaggtcgcgagacgcggcggtcaggatatctgcggtgtcgtcatctttcgcttcgccaatcgctttgcgtacgtcattagcgacgattgcgtaacggtcagccagttctttcaggtgatcctgaacgttgtggatgtccagcgggtaacttttcagcggggttttgctgttgataacttgagtggtccccagagctacaccgcccagctgcactgcacgttctgccatggtatccagatgatcgatcagtgcggtgcggaagccatccagcatttcatgtacggcaatgaagttagcgccgcgcatgttccagtgcgcttgtttggtaatcaaagaaagatcaataaactggataacctggcgattcagcaactctactgttgcttttttctcgctgtcggagacatcgttgcgggtataaagcagattggtcgctttacttttaactaatttagcggtactcataatttcatatcctcttgatgttatgtcccagtaattaacgagattaagtatagcaccggctatgtgttccgctattctggctgttcctatcacactaatagtggtaacaagcgtgaaaaacaaaactaataaagattcaatgagttagatatattgataagaacaattcttatttatctgctcgccaggaattttcggaataaatatgcttttgcataattcgatatataaagacggtgtagaggaaaagtagcgagaaattctgcatggttatgcataaccatgcagaaatgtaaatttaattaatgtctaattcttttattttgctctctttgcgtactgtcagcgtagaccccatactagcggcgatgatagcgccgagcgccagtagctgtatgggtgtcagtgtttctccgaggaaaatcatcccggaaacggcagccagcgccggttccatgctcatcagcgtaccaaatgtccgtgttggcaaacgggtgagggcaatcatttccaggctataaggcagagcggtgctgagaatagcgacagccagacccaatggaataacgctccagtgccagagtgcttcaccagcctgaagcgctccaattggcacgaaaattaacgctgcaatcaagctaccaattgccaccgtcgcagggccatgttccgctcctgcgcgttgcccacttaaaatgtaaatagcccaacaagccccggcccccagtgccagcgcacagccggttaaatcgacatgggaaacgtcttgccccagcggtagcaggaaccacagaccaagaaccgccagcacaacccagacgaaatctaccgggcgacgagaagagaacagcgccaccgccagtggtccggtgaactccagcgccaccgcaatacccagcggtactgtctgaatagaaagataaaaaagataattcatcccacccaggctaacgccgtaaaacaacagcggtaaccgttgctctttggcaaagcgcagtcgccatggcttaaagaacgcgatgaggatcagcgttcctaatgccagacgcagcgcagtgacacccggtgcgcccaccagaggaaaaagactcttagctaagctggctccaccctgaatagacgccatggcaacgagcaatatgactattggtaaccagaccggcattttacgtaaactaccaggcatcctttctcccacaaatatctagacttaagtaaagcgtggagtgtactggatatacccaatgctggttgagcatttgttgaaaaaattttcccccgttttgactaaaatgcgccaggattgatggaatcattagtctggtgattaggaataatctggatgaatgacagggaaaacatgcgtaatacttacgcagttctctgaaaaagtgatttaaatttagatggatagcggtgtatggaaacgttctgttacatgaaatggcccgttagacatcacaaatcgcgaagagtttcccattaatttttgatatatttaaaacttaggacttatttgaatcacatttgaggtggttatgaaaaaaattgcatgtcttagtgcactggccgcagttctggctttcaccgcaggtacttccgtagctgcgacttctactgtaactggcggttacgcacagagcgacgctcagggccaaatgaacaaaatgggcggtttcaacctgaaataccgctatgaagaagacaacagcccgctgggtgtgatcggttctttcacttacaccgagaaaagccgtactgcaagctctggtgactacaacaaaaaccagtactacggcatcactgctggtccggcttaccgcattaacgactgggcaagcatctacggtgtagtgggtgtgggttatggtaaattccagaccactgaatacccgacctacaaacacgacaccagcgactacggtttctcctacggtgcgggtctgcagttcaacccgatggaaaacgttgctctggacttctcttacgagcagagccgtattcgtagcgttgacgtaggcacctggattgccggtgttggttaccgcttctaatcactttggtgatataaaaaatccgcctctcggggcggatttttgtttttaaggtttcgggtcgaaaatatcggttccgagatggttgtaatccaccttctgtaactggaagttggtgatgtatatcggcccggctttcttctcagatataaacgggtatttgatgttaatttccttcgctttaatccccgtccactgggagaaaaagcctaagaagtcattggcactgcggcgggctttaatcacacgatgcgctttatcgtcgctggaaatgaccataaaaggcacctggaaattttgctgatatttatcatcatgggcaaggtattgcacgtctttaccgcgctctttaaaggccagaccgtggtcagaaaagtaaaccaggctgaagctgctgccgctgttgcgtaactgatcgtacagcttgcgcagtaaatcgtccgtttgcgtcatggtatagagatagcagctcgtttctttgctttgcacaaaggtttcgtattttccttgtgtcctgtcgcaggcctgcggatgactgcccatcagatgtagaacaatcagctgcggttggctgtgctcttgcgccagcacttgagcggtcatatccagtaacgcttcgtctttggtgtttttatctgcttcaaaattaccttctttcaggaagtacacttcatctgctcgtttggcgatgctggcgatagcggtatcgtattcgccgatttgaccctggttggaaaaccaccaggtctggaagcccgcgcgatttgccagggtgacaaagttatcctgaaactgtggtttgccatcgacaacgcgattgagcgttaagccaaggcttttctgcgtggagccactggcggcaatgtagtcagcaaatatcaaaccgttaacgctgctggcaaacggggtattgtcccagtgaccgccaaaggcaccgagggcatcgcgacgcgcgctttcaccgatcaccaccacataggtctgatacttcggcttaacggcagtgaccgtccaggtatctttcattccggaaagttttgccatccgttcttgctcttcaatcacctcgttattattgacgatgacatccttagcaaaacgaaataccggatagccagtatctttcagtttaaatacgccaccccaggccaggttttgcacgggagcaacaaaaaatgtcgccacactgaataccagacacaggctgtcgaaggtattccagcgcgctttttcattctctttttttcgcctgattgctattacgccgagcgcaaaaataaataagccgaccaggtagctgtaccacggaaaaatcgtcaggatttcggtgctctcttccatattggtggagtgcaatgccagcaatgtattgaaattaggcgcgccgtaggcctgagcaaaagggaaataacaagccgccaccaggctactgacaccgaccagaactttttgtacgcgaggcaatgttcgccatagcaaaagcaaaatagccgtaaacgcagcggtgtagagcaaactgaaggggtaacctaagccgaggttaattaataggctctgtaaaaagtagaacgcagtccacgggctaaatacccggctacgggtaacaaggctttctttgagggttaaattcatatgccactatcgtaacaaacgccatgtgcttaccctggcgtcaagggtcaatacctgcaagagtgcgtgaagagtggaaaggggtccgcatccgcgagccgcaatatacgcagggctgcaagaagatagagcgagccgccgtagtggtcaactactgacgaacaaatcttttgcgaaggggattgcaaatccgacaaaaagtggggtttttcagaccaaaacgcgttatgcctgcatgaaagcaggagtgaagcggcgtaccgcgacgccgctatttatcggaaggtttatcttgctgcggtttgttgttgaccatatcgcacaacatagagagcagcattaaccgtactttaaagggagaatgactaaacacgcgcatacacctcttgaactcattcataagacctcctgacttgctaatcccgtcgatccttgaggggtgattgcattacatacagatatagcacaggctatattatatagctattgctaaaacgttaattttttgtaccttcgcaactctggtttacaatgtgcgcacgaaatgagaacgctatgtatgcgtcaccataatgaggaagcacaatgagtcgtcgcgcaggtacgccaacagcaaaaaaagtgacgcagttagtgaacgtggaagagcacgttgaagggttccgccaggtcagagaggcgcatcggcgcgagcttattgatgattacgttgagctgatttctgacttgatcagggaagtgggggaagctcgtcaggtggacatggctgctcgtctgggagttagccaaccgacggtggctaaaatgcttaagcggctggcaaccatggggctgattgaaatgatcccctggcgtggcgtgtttttaacggcagaaggagagaagctggcgcaggaaagccgcgagcgacatcagatagtcgaaaatttcttgttggtgttgggcgtcagtccggaaatcgcccgtcgcgacgcggaaggcatggagcaccatgttagtgaagagacgctcgacgcttttcgtttgtttacccagaaacacggtgccaaatgagcctgccttttttacgcacgctgcaaggcgatcgtttttttcagttattaattcttgttggtatcggattaagctttttcgtgccctttgcaccgaaatcctggcctgctgctatcgactggcacaccatcatcaccttaagcggcctgatgctgctgaccaaaggtgtggagttaagcggttattttgatgtgctggggcgcaaaatggtgcgccgctttgctacggagcgtcggctggcgatgtttatggtgctggcggcggcgctgctttctacctttctgaccaacgatgtcgcgctgtttattgttgttccgctgactatcacgctaaaaagactgtgtgagatcccggttaatcggctgattatttttgaggcgctggcagtcaacgctggtagcctactgacgccaattggcaacccgcaaaatattcttatctggggacgttctggtcttagctttgccggatttattgcccaaatggcaccgctggctggcgcaatgatgctgacgctcctgctcctgtgctggtgttgtttccctggaaaggcgatgcaataccatacgggggtgcaaacaccggagtggaaaccgcggctggtgtggagttgtctggggctgtatatcgtctttctgacggcgctggagttcaaacaagagctgtggggactggtgattgtggcggcaggctttgcgctgctggcacgtcgcgtggtgctcagtgtggactggacgctgctgctggtgtttatggcgatgtttatcgacgtccatttactgacccagcttccagcgttgcaaggcgtgttgggtaacgtgagtcatctatctgaacccgggttatggttaacggcaatcggtttaagccaggtgatcagtaacgtgccgagtaccatattgttgctgaactatgtgccgccgtctttattactggtatgggcggtaaacgtaggtggctttgggttattacccggaagcctggcaaatttgattgcgctacgtatggcgaacgatcgccgcatctggtggcgtttccatctctatagtataccgatgctgttgtgggcggcgttggtgggatatgttttgttagttatactcccggccaactaaggtctggcaaataaaaaaggcggattatgagtccgccttttgctttaagttttgaagattaattcagacgaaccggcatcccggagcggtttttaatcgcttcatcaagaacaacctggtcaacatctggctgaccggtcactgtctgcacgctcttcgtcagggtaattggcacaatttcctgaccttcaaactgggcttcggtggtagacagcgggttatggacttcaatataacggctgccgtctggctcggtggtcgcttttaccggctcatcaataaactgtacgcgggtaccgaccggtactttctcgaacaggaatttgatgtcttcgttacgcagacgcacacaaccatgacttacacgcaggccgataccgaagttggcgttggtgccatggatagcatacaggcgaccgatatagagtgcatacagccccatcgggttatccggacctgccggaacgacagccggaagcggttcgcccgcagcgcggtactctgcgtgcattttggcggtcggcgtccaggtcgggcctgcttttttacgctcaactttggtggtccagttgataggcgtatctttgcctaactgaccaatgccgatcggcagcacgataacggtgttggtccctttcggatagtaataaagacgcatctcagcactgttaatgacgatgccttcatgaacggtatccggcaggatcagctgctgcggaatgttcagtacagtaccgcctttcggcaggaaggtatccacacccgggttcgcttccatcatattggaaagccccatctggtactcggcggcaaaatactccagcggctgagtgttaccttcaggaatggtgatcacctgattctgaccaaccaggcgactcccgtcggttggcagaggataagttaccgcagaggcggtactgcaaaagccgacaacagcgaaggccgctgcgaataatgttttcaatttcatattcatgttaagcgagattttgtgcctggcaggccattgggttgagaatattagagtattggaagcgcattataagttcattccagctcacagtgaaatcagatgtgtacgaaatcacattttttgcctttggcttgagtgtagaccttaagcgaggagcaggatcttctttcagacttatggcataatgcgcggtttgtcatatctcttttcaggatacgcctgtgttagtttccagtaacgtcaccatgcagttcggcagtaagccgttgtttgaaaacatttccgtcaaatttggcggcggcaaccgttacggcctgattggcgcgaacggtagtggtaaatccacctttatgaagatcctcggcggcgaccttgagccgacgctgggtaacgtttccctcgatcccaacgagcgcattggtaaactgcgtcaggatcagtttgcctttgaagagttcactgtgctggatacggtgatcatggggcataaagagttgtgggaagtgaagcaggagcgcgaccgcatctatgctttgccggaaatgagtgaagaagacggctataaagtggccgatctggaagttaaatacggcgaaatggacggttactctgcggaagctcgcgccggtgaactgttgcttggcgtgggaattccagtggaacagcactacggcccgatgagtgaagttgctcctggctggaagctgcgtgtgcttctggcgcaggcgctgtttgctgatccggatattctcctgctcgacgaaccgaccaacaacctcgacatcgacaccattcgctggctggaacaggtgctgaacgagcgtgacagcaccatgatcatcatcagccacgaccgtcacttccttaacatggtctgtacccacatggcggatctggattacggcgagctgcgcgtttatccgggtaactacgatgagtacatgacggcggcgacccaggcgcgtgaacgtctgctggccgataacgccaagaagaaagcgcagattgctgagttgcaatctttcgttagccgctttagcgccaacgccagcaaatctcgccaggcaactagccgcgcgcgccagattgataaaatcaaactggaagaggtgaaagcctccagccgtcagaacccgttcatccgttttgaacaggataagaaactgttccgtaacgcgctggaagtggaaggtctgaccaaagggtttgataacggtccgctgtttaaaaatctcaacctgctgctggaagtgggtgaaaaactggcggtactgggtaccaacggcgtcggtaaaagtacgctgctgaaaacgctggtgggcgatctgcaaccggacagcggcaccgtaaaatggtctgagaacgcgcgcattggttactatgctcaggaccacgaatatgagtttgaaaatgatctgaccgtgttcgaatggatgagccagtggaagcaggaaggcgatgacgagcaggcggtacgcagtattctcggtcgtttgctgttcagccaggacgacatcaaaaagccagctaaagtgctttccggtggggaaaaagggcggatgctgtttggtaagttaatgatgcagaagccgaacattctgatcatggacgaaccgaccaaccacctggatatggaatccattgagagcctgaacatggcactggaactgtatcagggcacgctgatctttgttagtcacgaccgtgagttcgtaagctccctggcgacccgcattctggaaatcaccccggaacgcgtgatcgactttagcggtaattacgaagattacctgcgtagtaaagggatcgagtaagtgattatccgtcaccccgatactgtcggggtgacggcggctgatgacaaatgcaaaatagcctgatgcgctacgcttatcaggcctacgcagtacctgcaatatattgaatctgcaggactttgtaggccggataaggcgttaacgccgcatcaggcattaacaaagcgcatttgtcagcaatctgagtaacgtcgaatcgattttcttaatcccacatcaattcacttccattaattctcaaacatccatgcccaacgctcgcttaccgtgaatgttgaggtcggcaagcgtaaagcgtccttcccagtttgtttcatagtcctcgcgcgggaagtcgcccgggcttgcgcctttttccagtgcggccttcaccttgtgcgcgtaggcaagatttttctcgcacatcggtgccgcaggaatgtacatcacgttgccccaaccttgttgattttcaacgggggcaacggaatggatgacgtcgcagtgccaccagacggagtctccggcttcgagttttggaatgctggttaacgcctcaatcaacagtggatgccattgctcacttaccggcaatactcttccgggcgctacgccgcacagttcatcctccggcacatcatcaagcagcggacgtaacagtacgtacgccatagcttcaggaatgggcacgacgtgcagcagcccctgaccaggcagcatatcagagagcgctgtccagccctggaatgtccgaaacacggaacatttggtggtgttgtccaccgtgtactcttcaacttccgtacgatgtgccgcatgccagggatcatattgcgccagattgccattaaagacgttggcgaaaacgcgctgatacgctggaagcagccagcgttccagtgccccggagtcggtatgcgctccaagacctttggaggtcgttccgggcggacggcggcggatacggtcagggtagatgacgctcacatccgggttaaaccattgctttccatcactttcaaatgtccacagacgattgagaaagctctgcgcattcgccatttcttcactctggcgggcctgcatttgcgcctggctccagtagatggggtaaatctcgggacgactagcgctgagcgtcccgaagaaattatcgccggggcctttgtagacctcgtcaaagcggttgcggtccagatagtccagcatgctctgatcccagcctagcgcttgttcgcgggggaaatggccttttatcaccgcacaaccgcgacgtttaatctgttcgcgctgctctgcagtaacatgacctgctttgatatcggcataagacagcaccggccagacggcatcgccctgtgctttgagtgcgttgatttcagccactcgcgtggcaatgtcatcgcttagctgattaaagatctgctggacgtcgccaagctgcgcccgcagcgcgtgcttcatctgacggatagctgctttgtgatcggcaggcaatgtgtcgctggtaaaagtagaagccataaccacctctcattaactttcattcgaaaccattctgatttgcatgtgacaatataagttataaataagttaatgcaagtttaatgatttgatgtgatgtacaggatgtaaaaagaagggaaaaccggagcgcacggctccggtagagaggtcagctgttaaaaggggatgtgttatccagcaccgcctgaatcacattcagcgcgccttcatgattattatcatcggtagcgtaacgggcgatttgtttaatgttttccgcagcattgcccatcgcaaaggaataacgcgccattttcagcatctccgcatcgttaccgctgtcgccaatcgctaccacattttgcggactcagatcccagcgtttcagtaaccggctaataccgtttgctttatgtagaccgggaataatcaggtcgataaagccaaaaccactggtaacgggtttcataatgccatcgagcgctacgtgcagtttgtcgatcactaacgggatttgttcatccggcaggttgaggctaaacttgaacagtacgtcgtcaatctcctgataatcttttacaggtttcaggcgatggtagtgttttgccatcagtgcgacaaatgcttcgggggcattttcgctgacatatgcactttgcagaccgcaggcgacaaaattgagttgcttatcttttagcaactcgccaataacaatccggctttcatgtcgggtcagttcgccgtggaacaactgcttgccatgttcgtaaaccagtgcgccgttttccgcgacaaaagagatctcatcctttagctcaggaaagaaactaataagctggtaatactgattaccgctggcaacaacgaacttaatgccgcgctttttcagttcctgatattgcgccataaaacgtggttggttgtacgttttggcgtcgttaagaaaagtaccgtccatgtctgtgacgataacttttacgctcataggtgtgctcctggctcgaaaatgaaaccgtaacagtgtaataacaatgtgacgcagagcacaaattatatttcgaatgaaagtaaggatgaaattgatgatgtgaatgatttagcccggcgacgacgccgccgggccgaggagattacagcatatgttcagtacgggcgatgatatcgtcctgagcgtctggagagagcgcggtgaagaacgcggaatagcccgcgacacgcactaccagatcgcgatactgatcgggatgttttttcgcatccagcagcgtttcgcgggaaacgatgttgtactgaatatgccagcctttatgcacttcaaagaaggtacgcagcaggatcatcagtttctgcttgtcagattcgttctccagcgttgccggattcagtttctggttgagcaacacgccgccgagaatcgctgccgtaggcagtttacccacactgccaatgaccgcagtagggccaagatggtcagtaccggaggccgggcttgcgccttctgccagcggggtgtgggctttacgcccgtccggtgttgccatagtctgcgcgccaaacggtacgttagcggagatactactcgtacccgcgtaatagttgccgccaaccggaccacgaccgtagcgcggattatggtactgtttcagttcgtcgatataggtctgataagcgcgagccagcagcgtatcgacagtatcatcgtcgttgccgtacttcggcgcaccgttaatcagccgctgacgcagctgctcgtgagtcaggccgtcgaagtcatctgccagtgcggcagcaagctgttgctgaccaatcgcaccttgttcaaacaccagtttcttcactgccgccaggctgttgccgaggttggcaatgccgacctgcaggccagaaacccagtcatatttcgcgccgccttgcttgatacttttcgctcgctcaatacagtcatccaccagcgcgctgcagagaatatcgtgcacgttctcttccagcatggtgtcgacgacatattcgatttcgatacttttgcgggtgtagtaacggatttgcgtatcccacgcgtccatcacttcatcgaagttgttgaagttacctgcgctcaacgctttttcttgtggcaggaacactttgccgctggtggcatcatgcccgccttccagcgccgccagcatcacgcgggcgaagttgataaagctcatgccggtacagcgatagccccatttgccaccgacggcggtttctatacaaccaatcgctgcgtagtcataagcgtcctgcggttcaataccgagtttaataaattccgggatcacgatttcgtcgttgttgaacgccggcatcccgaagccgcaacggatcacctgtacgcaggcgtcgaggaaatcgttgctcattcctgcatggtaacgcacgctgaggttaggctgagtggaacgcaggcgaccgcaggattcgaggatcgcgtaagagagtggattcaccgcgtccattggttgaccatcaaccagattttgcccgccaatagtgacgttctgatacagcggacttcccgcagaggctttactgtgactgccggagcggatcttgttcacttccagcagtttcagccagcagctatgcagcatctcgatggcgtgttcgcgatccagcgtctggttgagttcaacgtcgcggcgatagtacgggtagagatactggtccatacgaccaaagcttacactgtgaccgttagattcgatctgcaaaatcaactggatgaagtaacacagttgcagcgcctgccagaaagtctgcggcggctggtgggcgataagatcgcagttttctgccatcgccagcagttcatcgcgacggctttcgcgggtttcggtcgcggccatttcacgcgccagggcagcgaaacgttcaatgtgttcactgactgccaccagcacgatatcaatcgctttcaggaattgctcaccgtgtaaatcttccagcaccgtcaggttgatgcggctgcgacgttccgctacttcctcgcgcagaccatcaagccctttttccagcagcagcgggaaattcaccgccaggtgcgcatcgccggaggtcatattgccttccgctttaatgattccggtcgccagcagacctttttgctcatcggtaaacatgccgtagcagcgatcctgtacggtctgaccgcgccaccacgggcacacttcatgcagaacgcgtttgttctcttcgctcaccgcaaagccagcaccgggacgatctgccagatcatcaatctctttttcgatccagctgacagtatattccgggaagatcggcgcggcgcgaacttcgcttgcctggttgccaatgatcaactcatcgtgtttgatccagatggtgcgattcgccaggtgatgcgccagtgccagcgcgcgacgtaccgggatcggcttatcgagatgttgttgatacatctcggtatagtgctgcgcgcgctcggtacagactggcggtttcacaatatgcaccagcgcatttttgtgcgctttaatgcggtcgctgagcgtgtccagtttcagtgtggtcatggttgttatcctcgtaaggtcgcggttaaccctttctggcaggcatactgctgggcaaagtcgagcagttctggcgcatcaagcggtttttccggggcgtcatagggcagattaagtaagtgatatttgttgatgcccagcgtgtggtagggcagaaaatgaatttcgccaacgtgcagctcgtcggcggcaaaatcggtaatggcttttacagaggtttcgtcggcattaaagccctgaatcagcggcacgcggataatgatttttttgcccgctgcggcgagttttttcaggttatccagcactctggcggcgttaccgtcggtccactgtttaaacggcgcgtcggcaacgtgttttaaatcggcaagaaacagatcgatatagggcagagaaggggcgatatatttccacggcacatgcagacaggtttctaccgcagtatgaatgcctgcctcgtggctggcttgcagtagcgccatcgccatttccggctgcataaagggctcaccaccgctaagcgttaaaccgccgccgctgcgatcgtaaaacggtttatcgcgcagaacggtcgtcatgatctcctcaacgcttttcacttcaccacacacggttaatgcctgtgtcggacagcagtcggttaacgccgtcagatgctccggggttaacttttcccgatgaataagcaaaccattcagcgcgcgctcaatcacttccggcgcggccttagcgcacagctcgcagccttccagacacagtcgtgcgtcatacagcagatcctgcgtgcgggcgcggctttccgggttctgacaccagcggcagcccaggctacagcctttaagaaatacgaccgtgcggataccggggccatcatgggtgctgtagcgctgaatattgaaaatcatagttgcctctctatttcgttcaagcattaaaatactttcgaatgaaagttagattgatgtgcgtcaactgttcagagagttttcccgtgatagtctacattcagacaaaaagtacattttgaggatggttatggaactgtatctggatactagtgacgttgttgcggtgaaggcgctgagtcgtatttttccgctggcgggtgtgaccactaacccaagcattatcgccgcgggtaaaaaaccgctggatgttgtgcttccgcaacttcatgaagcgatgggcggtcaggggcgtctgtttgcccaggtaatggctaccactgccgaagggatggttaatgacgcgcttaagctgcgttctattattgcggatatcgtggtgaaagttccggtgaccgccgaggggctggcagctattaagatgttaaaagcggaagggattccgacgctgggaaccgcggtatatggcgcagcacaagggctgctgagcgcgctggcaggtgcggaatatgttgcgccttacgttaatcgtattgatgctcagggcggtagcggcattcagactgtgaccgacttacaccagttattgaaaatgcatgcgccgcaggcgaaagtgctggcagcgagtttcaaaaccccgcgtcaggcgctggactgcttactggcaggatgtgaaagtattactctgccactggatgtggcacaacagatgattagctatccggcggttgatgccgctgtggcgaagtttgagcaggactggcagggagcgtttggcagaacgagcatttaaccggacgttctgcatcctcataaattgctgatgacgtggcggagtgccgcgtcttatcaggcctggaggtggcaattactgcccacacacctcacaccccggattacgcatcagtttcatttcgcgaaactgacaggtcatcgcatcgtacatgacgattttcccgctggccggtttgccataacctgccagcattttgatcgcttccattgcctgcaagctaccaattacgccgatcaacggtgccattacgcctgcttccacgcaggttaatgcattttcaccaaacaaacggctaaggcagcgatagcacggttcaccgtcctgataagtaaagacggtgatttgaccttccatacgaattgccgcgccggaaaccagcggtaccttcgcggcaaaacagcctgcgttcagttgattacgtaccgcaacgttatccgtacagtcgagcaccagatcgtgttcagcaatcaatgctgcaagttctgcgtcatccagcagtgcattgactggcgtaatcgcgatatgtgggttgatccgcgtcagggcgtcacgggcggattccaccttcggttgcccgaccgtggcatcactgtgcagtgtctggcgttgcagattgctgaggctaaccgtgtcgaagtcgagcagcgtcaggttaccgacaccggcgcttgccagatactggctggctgcacagccgaggccgcccaggcccactatcagcacgcgagaatctttcagcgcctcctggccgtcaaaatcaaagccgcgcagaatgatttgccggttgtagcgcagcatctcctgatcgctgagttccgccattacaggcctccgaacaacgcgttaaacggttctacttccacccattcgcccacttccacattgccgcgatcgcgttccagcacgataaagcagttgccgaggctaaaggagctaaatatatgactaccctgatgtccggtggtcgtcacttccagttcgccatcggcgttgcgttgcagcacgccgcgctggaaatcaagacgtcctggcgtttttttcaggcgggacgctgtgcgtacgcgctggcgcgcgggcaggccgctggcggtgttaccgcttagttttgccagcaaaggctgtaccagttgatagaaggtcagcgtcgcactaaccgggttgcccggcaggccgcagaaccagctattgctgagtttaccgaacgcgaacggtttacctggtttaatcgccagcttccagaaggcgatctcccccagctcttcaagaatcgttttggtgtaatccgcctcacccacactaacaccgccggaactgatcaccacatccgcctggctgtcggcttcaataaatgcggcgcgcagggcatggggatcgtcgcggataatccctaagttaattacctcgcatcccaactgttctaacatcaggtgtacggcgagacggttggtatcgtagatttggccgtcgcccagcggctgaccgggcaactggagttcatcaccggtagaaaaaagcgctacacgcactttacgaatcaccggaacttcggcaatccccagactagcaattactggcagctctgcggtagtcaggcgagttcccgccgggaaaacaaccgcacctgcagagatatcttcaccgcgacggcgaatattttgcccgctacgcacttcagcagtaaaacgcacgccattgtccatttgttcagtctgctcctgcatcaccaccgcttcgcagccttccggcaccggcgcaccggtcataatacgaatgcaggtacccgcaggccattcaccatggtatggctgaccggcaaaggatttaccggcaacgggcagcggttgcccggaggcaatatcggctaaacgcaccgcgtagccgtccattgcggagttatcaaaccccggaacatcaagcgggctaacgacatcgctcgccagaatacgaccaaaacactgtaccagtggcagcgtttcctgggcggtcagtggggtgacgcgagaaagcatctcattaagcgcggtgtcgaggctcatcaatccggtggtaaattccatgaaaacactcctgcggaggcaaaatcgaatttgcctattatgtcagaaaaacgccacagactgtatgccacctcgggcgtagcgctgggtcctgcctttacatgccatatccatctttctatattcaaaaattgaatgagtaattcataaaaattctgatatttatagcaaaagtggcgaaccacccttaatggacgaatactatgggcaaagcagtcattgcaattcatggtggcgcaggtgcaattagccgcgcgcagatgagtctgcaacaggaattacgctacatcgaggcgttgtctgccattgttgaaaccgggcagaaaatgctggaagcgggcgaaagtgcgctggatgtggtgacggaagcggtgcgtctgctggaagagtgtccactgtttaacgccggaattggcgctgtctttacgcgtgatgaaacccatgaactggacgcctgtgtgatggatggtaacaccctgaaagccggtgcggtggcgggcgttagtcatctgcgtaatccggttcttgccgcccggctggtgatggagcaaagcccgcatgtgatgatgattggcgaaggggcagaaaattttgcgtttgctcgtggcatggagcgcgtcagcccggagattttctccacgtctttgcgttatgaacaactactggcagcgcgcaaggaaggggcaaccgtcctcgaccatagcggtgcgccactggatgaaaaacagaaaatgggcaccgtgggggccgtggcgttggatttagacggcaatttggcggcagccacgtccacaggcggaatgaccaataaattacccggacgagttggcgatagtcccttagtgggtgccggatgctacgccaataacgccagtgtggcggtttcttgtaccggcacgggcgaagtcttcatccgcgcgctggcggcatatgacatcgccgcgttaatggattacggcggattaagtctcgcggaagcctgcgagcgggtagtaatggaaaaactccctgcgcttggcggtagcggtggcttaatcgctatcgaccatgaagggaatgtcgcgctaccgtttaacaccgaaggaatgtatcgcgcctggggctacgcaggcgatacgccaaccaccggtatctaccgtgaaaaaggggacaccgttgccacacagtgatgaacttgatgccggtaatgtgctggcggttgaaaatctgaatattgcctttatgcaggaccagcagaaaatagctgcggtccgcaatctctcttttagtctgcaacgcggtgagacgctggcaattgttggcgaatccggctccggtaagagtgtgactgcgttggcattgatgcgcctgttggaacaggcgggcggtttagtacagtgcgataaaatgctgttgcagcggcgcagtcgcgaagtgattgaacttagcgagcagaacgctgcacaaatgcgccatgttcgcggtgcggatatggcgatgatatttcaggagccgatgacaagcctgaacccggtatttactgtgggtgaacagattgccgaaagtattcgtctgcatcagaacgccagtcgtgaagaagcgatggtcgaggcgaagcggatgctggatcaggtacgcattcctgaggcacaaaccattcttagtcgttatccgcatcaactctctggcgggatgcgccagcgagtgatgattgcgatggcgctgagttgccgcccggcggtgctgattgccgatgagccaaccaccgcgctggatgtcactattcaggcgcagatcctgcaattaatcaaagtattgcaaaaagagatgagcatgggcgttatctttatcactcacgatatgggcgtggtggcagagattgccgatcgggtactggtgatgtatcagggcgaggcggtggaaacgggtaccgtcgaacagatttttcatgcaccgcaacatccttacacccgtgcgctgttagctgctgttccgcaacttggtgcgatgaaagggttagattatccccgacgtttcccgttgataagccttgaacatccagcgaaacaggtcccccccatcgagcagaaaacggtggtggatggcgaacctgttttacgagtgcgtaatcttgtcacccgtttccctttgcgcagcggtttgttgaatcgcgtaacgcgggaagtgcatgccgttgagaaagtcagttttgatctctggcctggcgaaacgctaagcctggtgggcgagtctggcagcggtaaatccactaccgggcgggcgttgctgcgcctggtcgaaagccagggcggcgaaattatctttaacggtcagcgaatcgataccttgagtcccggcaaacttcaggcattacgccgggatattcagtttatttttcaggacccttacgctagcctggacccacgtcagaccatcggtgatagcattatcgaaccgctgcgtgtacacggtttattgccaggtaaagacgcggctgcacgcgttgcgtggttgctggagcgcgtgggcctgttacctgaacatgcctggcgttacccgcatgagttttccggcggtcagcgccagcgcatctgcattgctcgcgcgttggcattgaatccaaaagtgatcattgccgacgaagccgttagcgcgctggatgtttctattcgcgggcagattatcaacttgttgctcgatctccagcgtgatttcggcattgcgtatctgtttatctcccacgatatggcggtggtagagcggattagtcatcgtgtggcggtgatgtatctcgggcaaattgttgaaattggtccacggcgcgcggtcttcgaaaacccgcagcatccttatacgcgtaaattactggcggcagttccggtcgctgaaccgtcccgacaacgaccgcagcgtgtactgctgagcgacgatcttcccagcaatattcatctgcgtggcgaagaggtggcagccgtcagcttgcaatgcgtcgggccggggcattacgtcgcacaaccacaaagtgaatacgcattcatgcgtagataacattcaggcggagaataaaatggcaagagctgtacaccgtagtgggttagtggcgctgggcattgcgacagcgttgatggcatcttgtgcattcgctgccaaagatgtggtggtggcggtaggaagcaatttcaccacgctcgatccgtatgacgcaaatgacacgttatctcaggccgtagcgaaaagcttttaccaggggctgttcggtctggataaagagatgaaactgaaaaacgtgctggcggagagttataccgtttccgatgacggcattacttacaccgtgaaattgcgggaaggcattaaattccaggatggcaccgatttcaacgccgcggcggtgaaagcgaatctggaccgggccagcgatccggcgaatcatcttaaacgctataacctgtataagaatattgctaaaacggaagcgatcgatccgacaacggtaaagattaccctcaaacagccgttcagtgcgtttattaatattcttgcccatccggcgaccgcgatgattagtccggcagcgctggaaaaatatggcaaggagattggtttttatccggtgggaaccggaccgtatgaactggatacctggaatcagaccgattttgtgaaggtgaaaaaattcgcgggttactggcagccaggattgcccaaactggacagcataacctggcgtccggtggcggataacaacacccgcgcggcaatgctgcaaaccggtgaagcgcagtttgctttccccattccttacgagcaggccacactgctggagaaaaacaaaaatatcgagttgatggccagtccgagtattatgcagcgttatatcagtatgaacgtgacgcaaaagccgttcgataacccgaaggtccgtgaggcgctgaattacgccattaaccgtccggcgctggtgaaagttgcctttgcgggctatgcaacgccagctactggtgtggtaccgccaagtatcgcctacgcgcaaagttataaaccgtggccttacgatccagtgaaagcgcgcgaattactgaaagaggcgggatatcccaacggtttcagtaccacgctgtggagcagtcataaccacagcaccgcgcagaaagtgctgcaatttacccagcagcagttagcgcaggtcgggattaaagcccaggtgactgcgatggatgccggacagcgggcggcagaagttgaaggtaaagggcaaaaagagagcggcgtgcggatgttctacactggctggagcgctagtaccggcgaagcggactgggcactaagcccgctgtttgccagccagaactggccaccgacgctgtttaataccgcgttttacagcaataaacaggtggatgacttcctggctcaggcactgaaaactaatgatccggcggaaaagacccgcttatataaggcggcgcaggatatcatctggcaagaaagcccgtggatcccgctggtggtagaaaaactggtgagcgcacacagtaaaaacctgaccggtttttggatcatgccagacaccggcttcagctttgaagacgcggatttgcaataagcaacgcagggagtggaatgcttaattacgttatcaaacgcttactggggttgattccgacgctgtttatcgtcagcgtgctggtgtttttatttgtccatatgctgcccggcgatccggcgcgattgattgccgggcccgaagctgatgcgcaggttatagaactggtgcgtcagcagctggggttggatcagccgctgtatcaccagttctggcactatatcagcaatgctgtgcagggggattttggcctgagcatggtgagccgtcgtccggttgccgatgagattgccagccgctttatgccaacgctgtggctgaccataaccagtatggtctgggcggttatatttggtatggcggcgggaattatcgccgccgtctggcgtaaccgttggccggatcgattgagtatgaccattgcggtgagcgggatcagctttccggcatttgctctggggatgcttttaattcaggtattctccgttgaactgggctggctgcctaccgtgggagcagacagttggcagcactacattttaccctccctgacgctcggcgcggcagtggccgccgtgatggcgcgctttacccgcgcgagctttgtcgatgttttaagcgaagattatatgcgtaccgcgagggcgaaaggggtgagcgaaacctgggttgtcctcaaacacgggctacgtaacgcgatgatcccggtagtgaccatgatgggcttacagtttggctttttgctcggtggttccatcgttgtggagaaagttttcaactggccgggacttggacgcttactcgttgactccgtagaaatgcgtgattacccggtgattcaggcggaaattctgcttttcagcctggaatttattcttatcaacttagtggtggatgtgctttacgccgccattaacccggctatcaggtacaagtaaggatgcgactatttaactggcgacgtcaggcggtgttaaacgccatgccactggtcaaacctgaccaggtacgtacaccgtggcatgaattctggcgacgatttcgccgtcagcatatggcgatgaccgccgcattattcgttattttattgattgtggtggccatttttgcacgctggatcgctccctatgacgccgaaaattattttgattatgacaatctgaataacggaccttctttgcagcactggtttggcgtcgatagtctggggcgtgacattttcagccgtgtcctggttggtgcgcaaatcagcctggcggcgggcgtgtttgccgtgtttatcggtgcggcgatcgggacgttgctgggcttgctcgctggatattatgaaggctggtgggatcggctgatcatgcgcatttgcgatgtgctgtttgccttcccgggtattttactggcgatcgctgttgttgcggtgttgggaagcggcattgctaacgtgattattgcagtcgccattttttccatccccgcgtttgcccgcctggtgcgcggcaacacgctggtgttgaaacagcaaacctttattgagagtgcacgcagtattggtgccagcgatatgaccgttttgttgcgtcatatcctgcctgggaccgtctcttctatcgtggtgtttttcaccatgcgcattggtaccagcattatctctgccgccagcctcagttttctcggcctcggtgcgcagccgccgacaccagagtggggagcaatgctcaatgaggctcgagcggatatggttatcgcgccgcatgtcgctgtttttccggccctggctatttttctgaccgtactggcgttcaatttgttgggcgatggtttacgcgatgcgctggatccgaaaattaaaggataattacgtttgaatattgcttgaaagggtaatcacctcacaggaaattattgccctaagcaagtgttgtaactttctgctgattttgtagaatcgggtaatttggttaaaaagccgcagcaagggacaatttttgcagcggcacagcgttcagatagttattttgttaaatgtattaacatgctgagtttatacgaaaagataaagataaggctgataattttatttttattggcagcactgagttttattggtctttttttcatcattaactatcaactggtaagcgagcgcgcggtaaaacgtgccgatagccgctttgaacttattcagaaaaacgttggctatttctttaaagatattgaacgtagcgccctgacattaaaggacagtctgtatttattaaaaaatacagaggagattcaacgcgccgtgattcttaaaatggaaatgatgccatttttagacagcgtgggactggtacttgatgataataaatattatctttttagccggagggcgaatgataaaatcgttgtttatcatcaggaacaagtaaatggaccgcttgtcgacgagagtgggcgggttatttttgccgattttaacccaagcaaacgaccgtggagcgtggctagtgatgactctaacaacagctggaatccggcatacaattgctttgatcgtccgggtaaaaaatgtatctcttttacgctacacatcaacggcaaagatcacgatttgttagcggtggataaaattcatgtcgatttaaactggcgatatctgaacgagtatcttgatcaaatcagcgctaatgatgaagttctatttttgaaacaaggccatgagatcattgccaagaatcaactcgctcgtgaaaaactgattatttataatagcgaaggtaattataatattattgattctgtcgatactgaatatatcgaaaaaacaagtgcggtgccaaacaacgcattattcgaaatctatttttattatcctggcggtaatttattgaacgcaagtgataaacttttttatctgccgtttgcgttcattattatcgtattgctggtggtttatttaatgaccactcgtgtgttccgtcggcaattttctgaaatgacagagctggttaatacgctggcgtttttgcctgacagtacggatcaaatcgaggctctgaaaattcgtgaaggcgatgcgaaagagattatcagcatcaaaaatagcatcgcggaaatgaaagatgccgaaattgaacggagtaataaattgctcagtctgatctcttacgatcaggaaagtggttttattaaaaatatggcgattattgagtctaacaataatcagtatctggctgtggggatcatcaaactgtgtggtctggaagccgtggaagcggtgtttggtgttgatgagcgcaataaaatcgtcaggaaattgtgtcagcgaattgccgagaaatatgcgcaatgctgcgatatcgtgacattcaatgccgatctctatttacttctgtgtcgggaaaatgtacagacatttacccgtaaaatagcgatggtaaacgattttgacagcagctttggctaccgcaatctgcgcatccataagtctgccatttgtgaacctttgcagggggaaaacgcctggagttacgcagaaaaactgaaactggcgatttccagtatccgtgaccatatgttcagtgagtttattttctgtgatgacgcgaaactcaacgaaatagaagagaatatctggattgcgcgtaatattcgccatgcaatggaaattggcgaactattcctcgtctatcaaccgatcgttgatattaacacccgcgccattctgggcgcggaggcgttgtgccgttgggtgtctgcggagcgggggatcattagtccgctgaagttcattaccattgctgaagatatcgggtttatcaatgagctgggttatcagattattaaaacggcaatgggtgaattcagacattttagtcagcgtgcgagcctgaaggatgatttcttactgcatattaatgttagcccctggcagttaaacgaaccacactttcatgagcgttttaccaccatcatgaaagaaaatggcctgaaggcgaacagcctctgtgttgagatcactgaaaccgtgatcgagcgaattaatgaacatttttatctcaatattgaacaactgcgtaaacaaggggtacggataagcattgatgactttggcaccggtttgagtaacctgaaacgtttttatgaaattaatccagacagcataaaggtggacagccaattcaccggcgatattttcggtactgcgggaaaaattgtgcgcattattttcgacctggcacgctataaccggatcccggtgattgcggaaggcgtagagagcgaagacgttgcgcgcgaattaatcaaattaggatgtgttcaggctcaggggtatctgtaccagaaacccatgccattctccgcctgggataaaagtggaaaattagtaaaagagtaatttacgtatgtccagaatcaataagttcgtacttacagtcagtctgctgatttttatcatgattagtgcagttgcctgcgggatctacactcaaatggtaaaggaacgggtgtatagcctgaaacagtccgttattgatactgcttttgcggtggcaaatattgctgaatatcggcgtagcgtggcaattgatcttatcaacacgctaaatcccacggaggaacagctgttggttggtttgcgcacagcttacgccgacagcgtttccccctcttatttgtacgatgtcggtccttatctgatttccagtgacgaatgtattcaggtaaaggagttcgagaaaaattattgtgcagatattatgcaggttgtgaagtatcgacatgtcaaaaatacagggtttatctcttttgacggtaaaaccttcgtctattacctctatccggtaactcacaatcgtagtctgatatttttgcttggtctggagcgtttttctttactgagtaaaagcctggcgatggacagcgagaacctgatgttctctctatttaagaacggtaaaccggtgaccggtgatgaatataatgctaaaaacgccatcttcaccgttagcgaagcgatggagcacttcgcctatttgccgaccggattgtatgtatttgcgtataaaaaagatgtttatttgcgggtttgtacattgattattttctttgccgcattggtggcagtgataagcggtgccagttgcctctatctggtacgcagagtgattaatcgtggtattgtggagaaagaagccatcattaataaccattttgaacgcgtactggatggcgggcttttctttagcgctgccgatgtcaaaaaactctacagtatgtataacagcgcgttcctggacgacctgaccaaagcaatgggcagaaaatcctttgacgaagatttaaaagcgctgccggaaaaaggcggttatttgtgcctgtttgacgtcgataaattcaaaaacattaacgacaccttcggtcatttgctgggcgatgaagtgttgatgaaagtggtgaaaatccttaaaagtcagatcccggtagataaaggtaaagtctaccgcttcggcggtgacgaatttgcggtgatttatacgggtggaacgctggaagagttgctaagcattctaaaagaaatcgttcatttccaggtgggaagcattaatttaagtaccagtatcggtgtagcacatagtaatgaatgtcctaccgtcgaacgcttgaaaatgctggcggatgagcggctgtataagagtaagaaaaacggcagggcacagattagctggcagtaatcattattcgcaggccggacaaatgattttgcccggcctgaattaattaaacccggctaccccacaaatcgtactcatcggcgtgctcgactttcacacgcaggatatcacccggcttaacgttggtttcaccattgagataaaccgcgccgtcgatttccggtgcatctgccatgctgcgaccaatcgcgccttcttcgtccacttcgtcgataatcaccagaatttcacggcccactttctcttgcaggcgctcggcggaaatctgctgctgcagctgcatgaaacggttccagcgttcttctttaacttcttccggaacctggtcaggcagggcattggcgtctgcaccttcaaccgggctgtatttaaagcagccaacgcgatccagacgcgcttctttcaggaagtcgagtagcatctggaaatcttcttctgtctcgccagggaagccgacaataaaggtactgcgtagggtcagttccgggcagatttcgcgccactgtttgatgcgcgccagttggcgatctacagaacccggacgcttcatcagtttgagaatgcgcgggctggcgtgctgcaacggaatgtccagatacggcaggattttgccttctgccatcagtgggatgacgtcgtccacatgcggataagggtaaacgtagtgcagacgtgtccagatccccagtttgcttaactgttcgcacaggctgaccatgctggtttttaccggctcgccgttgtggaagccagtacgatgtttaacatcaacgccataggcggaagtatcctggctgatcaccagaatctctttaacgcccgcatctaccagacgtttcgcttcacttaacacttcgccaatcggacggctcaccaggtcgccgcgcatagacggaataatgcagaaggtgcagcggtgattacagccttcagaaattttcagataggcataatgacgcggcgtcagtttcacaccttgttctggcaccaggctcaggaatgggttgtgtttcggttttggcacgtagtgatgaacgtgctccagaacctgctcatagctatgaggcccggtgatttccagcactttcgggtggacttcgcggatctgatcttcttttgcccccagacaaccggtcacaataaccttgccgttttcattcaacgcttcaccaatggcttccagactttcttgtaccgcgctgtcaataaagccgcaggtgttgacgatcaccatgtccgcatcgtcatagctcggtaccacgtcataaccttcagtgcggagttcggtgagaatacgctcactatcaacaaggtttttcggacagccaagggaaacaaagccgattttcggctggggagttactttgctcatagcttaaaaaatattcagttacaggaaaggtcagggcagggattctacagagttctggataaaatttgtatcgcaatctcattcgctggcggaggcgaaggaaatgtaaattttgttaattcggcgtgaagaattgatcctggacagcattttgctcaaaaaatagccatactatttaattgcaacaaggctgggaagaggaggatcgaagtatgttcgttgacagacagcgaatcgatctgctgaaccggttgatcgacgcacgcgttgacctcgccgcatacgtgcaactgaggaaggcaaaaggatacatgtccgtcagcgaaagcaatcatctacgagataacttttttaaactgaatcgcgaactgcacgataaaagcctgcggttgaatcttcatctggatcaggaagagtggagtgctcttcatcatgctgaagaagcattagcgacagccgcagtatgtttgatgagtgggcaccatgattgcccgactgttattaccgtcaacgccgataagcttgaaaattgtctgatgagcttaacgctgagtatccagagcctgcagaagcacgccatgcttgagaaggcctgaaaactaagggggagaaagcgtctcccccttcatgtttaagtttttgtaaaaatgaatttgttatctcctccactgactacgctttaagccagagtcaatccggaggcgttatgcatcgacaatcctttttccttgtgccccttatttgtctttcttccgctctctgggcggctcctgcaacggtaaatgtcgaagtactgcaagacaaactcgaccatccctgggcactggcctttttacccgataatcacggtatgttaatcactctgcgcggcggcgagttgcgtcactggcaagcaggaaaaggattatctgcgccgctttccggagttccggacgtttgggcgcacgggcagggcggcctgctggacgtggttttagcgcctgattttgctcagtctcgccgcatctggttaagttattccgaagttggcgatgatggcaaagccggaactgctgtgggttatggccgcttaagtgatgatctcagtaaagtgaccgacttccgcaccgtctttcgccagatgccaaaactgtctaccggcaaccattttggcgggcggctggtattcgacggtaaaggttatctttttattgctctgggcgaaaacaatcagcgcccgacggcgcaggatctggataaattacagggcaaactggtgcgtctgaccgaccagggcgaaatcccggatgataatccttttataaaggaatccggtgcgcgcgccgagatctggtcttatggcattcgtaatccgcaaggaatggcgatgaatccgtggagtaatgcactgtggctgaatgaacatggcccgcgcggtggtgatgaaattaatatcccgcaaaaaggcaaaaactacggctggccgctggcaacctggggaatcaactatagtggctttaagataccggaagcgaaaggggagatcgtcgccgggaccgagcaacctgttttttactggaaagatagccccgctgtgagcggcatggccttctataacagcgataaattcccccagtggcagcaaaaattatttattggcgcgctgaaagataaagatgtcattgtgatgagcgtcaacggcgacaaagtgacagaagatggccgtattttaacggacagagggcagcgaattcgtgatgttcgcactggacccgacggttatttatacgttctcaccgacgagtccagtggggaattacttaaagttagcccacgcaattaactaacgggaatcatcaccactttgcgcactgcggggcgttcagtgagttgctgataccagcgttgcagatttggacgcggtgtccaggtcaggccaacgttaaacaaattgtagatgaacggtgcgatagcgatatcgcccacaccaaactcgtcgccagagaaccattttacttttgccagttccgcatcgagcagggcaaacagggcgtcgcactctttgcaactggcatcaatggcggcctgatcgcgctcttccggtggtgttctgactaatcccatcaggatcccgcgatgagcattactgagcgtctggtttgcccagtccatccatttttccgcttccgcacgacgtgccggactgtcgatccacaggcgtttttgcccgtactgtgccgccagatagcggacaatggcgttactttcccaaagaatgagatcactttcgtcgtcacgcaacaacggcaccagcccgttagggttcatcgccagaaaatcagcatcgtgatttatcccaaactcacggcccgcgagaatttgctcataaggtagttccagttcttcgagcgtcagcaatactttttttacgttagtactattattccgaccccacagcgtaatcatactcaccccttttccgacaggcagccacaggctgaacaggactccgatggtgaagtaaagttaacttttaagcaacagctggcaaaaaaatgacaccagaagcagcgaagcggcaggatattgcataaactttaaaaactttaccaacttacggtttctttaagtttgtgtgtgcgttattaatcaccaaacttatcatacggcgatataacgtattttttttgaatggatactcgggtggcatttatgacgcaatactcctctctccttcgtggtcttgcagcgggttctgcatttttattcctttttgccccaacggcattcgcggcggaacaaaccgttgaagcgccgagcgtggatgcgcgtgcatggattttaatggattacgccagcggtaaagtgctggcagaaggcaatgcggatgagaaactggatcccgcgagcctgactaaaatcatgaccagctatgtggttgggcaggcgcttaaggccgataagattaaactcaccgatatggtgacggtcggtaaagatgcctgggcgacgggaaatccggcactgcgtggtagtagcgtaatgttcctcaaaccgggcgatcaggttagcgtggcagacttgaacaaaggtgtgattatccagtccggtaatgacgcctgtattgcgctggctgattacgttgccgggagccaggagagttttattggtctgatgaatggttatgccaaaaaactgggtctgaccaacactaccttccagacggtgcacggcctggatgcgccggggcagttcagcaccgcgcgcgatatggcattgctgggtaaagcattgatccacgatgtgccggaagagtacgccattcataaagagaaagagttcaccttcaacaaaattcgtcagcctaaccgtaaccgtctgctgtggagcagcaatctgaatgttgatggcatgaagacaggaaccacggcaggcgcgggatataatctggttgctagcgctacccagggcgatatgcgtttaatctccgtagtgttgggggcgaaaaccgaccgtatccgttttaatgagtctgagaaattattgacctggggtttccgcttctttgaaaccgtgacgccaattaaacctgatgccacctttgtgactcagcgcgtctggtttggtgataagagcgaagtgaatctcggggcaggtgaagcgggcagtgtgaccataccgcgtgggcagctgaaaaacctgaaagcgagttatacgttaacggaaccgcagcttaccgcaccgctgaaaaaaggtcaggttgtcgggaccattgatttccagcttaacggtaaatccattgagcagcgtccgctgatcgtgatggaaaatgtggaagagggcggattctttggtcgggtgtgggatttcgtgatgatgaaattccatcagtggttcggcagctggttctcttaatcttctgataaccggatggcgcgaaacgtcatccggttatacgtcattaatacatcaacttaatgcgctgcgtctgcgcgtacttcacatactcatcttccgggcaacaatcgctcaccacaatatcaaagcgtttcaggtcacccatgcgcgccggacgcaccttgccaaatttactgtggtcgacaaccagcacatgcttttgcgccatgctcatggcccagtgttttaccggcaactcttcaagattaaaacaggtagcgcctttactgacatgcacgcccgccgcagaataaaaagcgatatccgggcaaaaattattcagcgtttgctgaaaatcgatgggtttgaaaatggcgttgctggcgtgaaattcaccaccgcaaagaaacgcgcggcaatggggtttctctttcagcgccagaaaggtatttaggctataacaaacggcggtaaaagggatttcattatcaatcgcttcaataatccacggcgtggtggtgccacagtcaaaaaagagggtctgatcgggttctaccagcgtcgcagccagttttgccgcccggcgtttttcttccaccaggcgggatttttgatcgcttaacaggtaatggctggcactgcgcggttccagaacaatatagccgccgagcaaaacgacgggcgcactgtggttgttcagatcgcgacgaatcgtcatctcgctaaccccaagcagggcggcggcgtctttaagatgtaacttatcgctgcgttttaattcttgcagcagctgcccgatacgctcttcgcgacgtgtttccataatccctctgaatagttattgaagcgagccgctcaatactacactttttagcagagatcagtcacgcacccagcctttgcggatcggtaatgcaaaacagacgcgataccagctttgcagacgttgatagagtttatgccccatcgcttgccagataatctgggcactaaggcagccaatcatacctgccagcaatccaccgagcatatccagcggccagtggacgccaagataaacgcggctccaggcaatgacgacggccagcaccattaaaagactgccggaccacaggcgatgccagcataaaaatgccagtgcaaaggtgaaaatcaccgtaccgtgatcgcttgggaaactgtcatccgccgcatgatgcaggaagttatagccgatattttcgacaaagggtcggtcgtgcggaaaaagatgtcccatcgtccaggacacaaacaggctgaccgccagcgcgatagcgatttttatcaccagttgccgttgtgctgtaagcccccacaaccaaagtaccacggccagcaacggcaccacggtaatcaaatctttagcaataaaaatcgccaagctgatcatccacggagcgctgtctggcgtcgcgttaataagagagaatagagagagattcaaattttccagcataacttcccgacgcaaagtgattaaaagggagccaatacaggcaagtcgttgagaataaagtgcaggttaaactgggtaaagcggcatcgtcttatttccctcaagcggcctgtttacggtgggtgattgtaacgggcataggttaaataaaacttaaagaaagcgtagctatactcgtaataatgtaagaatgtgcttaaccgtggtttcagctacaaaattcgctttctcgttagctgcgcttttattaaactctgcgcgattattattggcgaagaaattgcatgcaaaataaattagcttccggtgccaggcttggacgtcaggcgttacttttccctctctgtctggtgctttacgaatttagtacctatatcggcaacgatatgattcaacccggtatgttggccgtggtggaacaatatcaggcgggcattgattgggttcctactagcatgaccgcgtatctggcgggcgggatgtttttacaatggctgctggggccgctgagcgatcgtattggtcgccgtccggtgatgctggcgggagtggtgtggtttatcgtcacctgtctggcaatattgctggcgcaaaacattgaacaattcaccctgttgcgcttcttgcagggcataagcctctgtttcattggcgctgtgggatacgccgcaattcaggaatccttcgaagaggcggtttgtatcaagatcaccgcgctgatggcgaacgtggcgctgattgctccgctacttggtccgctggtgggcgcggcgtggatccatgtgctgccctgggaggggatgtttgttttgtttgccgcattggcagcgatctcctttttcggtctgcaacgagccatgcctgaaaccgccacgcgtataggcgagaaactgagtctgaaagaactcggtcgtgactataagctggtgctgaagaacggccgctttgtggcgggggcgctggcgctgggattcgttagtctgccgttgctggcgtggatcgcccagagcccgattatcatcattaccggcgagcagttgagcagctatgaatatggcttgctgcaagtgcctattttcggggcgttaattgcgggtaacttgctgttagcgcgtctgaccagccgccgcaccgtacgtagcctgattattatgggcggctggccgattatgattggtctattggtcgctgctgcggcaacggttatcagtagccacgcgtatttatggatgactgccgggttaagtatttatgctttcggtattggtctggcgaatgcgggactggtgcgattaaccctgtttgccagcgatatgagtaaaggtacggtttctgccgcgatgggaatgctgcaaatgctgatctttaccgttggtattgaaatcagcaaacatgcctggctgaacgggggcaacggactgtttaatctcttcaaccttgtcaacggaattttgtggctgagcctgatggttatctttttaaaagataaacagatgggaaattctcacgaagggtaaaaaaatgcctgactgctttgtgcgatcaggcattctcgaattaatggtgatggtcgtcaatctggtgttcgataaccatcccttcacctacgctggcaagatggcgaacataaggatgcgggcggtaagccggagctggcgcaggagccacatagacggtttgcggcacagtcgcgacgctgaccgcttgtggaacgctgacactatcaggaaccacaaccactttgtatccactcggcacatcgacggtgacactttgcgccatcgccacaccagtaaagcccattaaaagcgcgcccaacagtagacaatttttcataatcatttcgcctgaaataatgcagcgggttaatttccgcgaattatgcagccttcattcaggcattgtgttgccgggcgtgctgccggttttattggtcaaatggcgcttcgtgtttaagaactttatcgatcacatccagtacgccttcacggttattggagcctgcgcggtattttgccgctgcgacgaccgcgctaccggcattttccattgcaaaactaaagcctgcctgacgcagcatctcaatatcgttaccgccatcgccaaagaccaccacttcgctgtcgtctattccccataatttctgcagttggcgaaggccattggctttatgtacgccggggataatcagatcgatgctgccgttgccggtgtggacgctcaccataatatcgccgatggcctcatgtaatgctttttgtacttgtggaatcagttcatcggaaagattcaggccaaacttaaagaagatatcctctaagttgtcaaagttatcgacgtattccagacggtgataatacatttccgccaccgttttcatggcatcgtcatattttttgagtgtataggcactattttttccgcaggcaataatttccacttccgggcgcgtcagcaaatgttccacgacagtagcaaacgcatccttgcttagctcgccattaaaaacatctttgccttcgctcactacccagccgccgttttcagccacaaaggcaatttcattagcaatttcagggaagaaagagatcaactgataatattgattcccgctggcgactacaaagcgaattccttgtgctttcatttgctgatactgagccataaaccgctcacggttataggttttttgatcgcttaagaaagtaccatccatgtctaccgcaattaatttaatgctcatcaactattctccatcgccgtctgcgttttggtatcgggtttggcgacggctttcgcgacaatagccgcgagaataaccagcgccagtacaaccagcattgcactacgtaatccataatgttcgccgagatagcccagcagcggcggcccgacgaggaaagccagataaccggtcgttgctaccacactgacgcgggttggtgcatcggggccggtatcgctggcggcagaaatggtcagcgggaagcccaggctggcacccagtccccagagtacaacagacaccccagcgacccaggcgctatcgacaaaaataatcagcccaatacccaacgcccccattagtgcactggcccgaaccacggcaacgcgactgtaacggtcgatgaaccaaccgccggtgaagcgtccaacggtcatccccagggtaaaaccggcataaatcaggctgccggaagtagggctaaaaccgtgaccgtcaaccattaataagggtaaccagtcgttggcagaaccttcggcaaaggccatcgccagcaccacaacacctatcagcagcaactggatatcgcgataaaaaggtacgcctttttcgccatgctgggtgccatcggcagcatttttgcccgtaccgtcagggattgcctgaatggcgatataaataggtgcgatacctaccagcgccgccaataaaatgtgcaccgttgccggaacgccaaaggccgtcagtgccatcccgacacctgcgcctgccagcgtgcccaggctataaaaaccgtgcatcatcggcaaaaccgtcttattcatttctcgctcaacggcagcaccttcaacgtttatcgccacttccgcagaaccaaaacttgccccaaagacgccgagaccaacggcaaagagcagggggcttgtcagccagagtgccagacttaatatcatcatcccgatcaatgcgcaggacatcgtgaccaggatgacattacgtgtcccaaagcgtttcactaaccacgcgctgcagagaataccgctcatgctaccgatgctcagaccaaagagaacaccgcccatttcagcgatgctgacagagagaatatcgcggatagcaggcgtacgggttgcccaggacgccattaacaggcctggcaaaaagaagaacataaacagcgcccaggttcggcgtttcaatgcattacgactagaatttacggtcatagatcacgtcaaaataagaagagggaagacaacattagcaaggttgtgtacatttgtacacaattgcagagagaggaaatgacatgcgtcgcgctaacgatccgcaacggcgagaaaaaattatccaggccacgctggaggcggtgaaactttacggaatacatgctgttacgcaccgcaaaattgctacccttgccggggtaccgttgggaagcatgacctactattttagtggaattgatgagttgttactggaggcgttcagcagttttactgagatcatgtcccggcaatatcaggcattttttagcgatgttagtgatgctccgggcgcatgccaggctatcaccgatatgatctacagcagtcaggttgcaacgccggataacatggagctgatgtaccagctctacgcgctggctagccgaaaaccgctattaaaaacggtaatgcaaaactggatgcagcgcagtcagcaaacgctcgaacaatggtttgaacccggaaccgcccgcgcgcttgatgcgtttattgaggggatgacgctgcattttgtcaccgaccgtaagccgctaagccgcgaggagattttgaggatggttgagagggttgcagggtaatagataagttttagataacaaaaaacccatcaaccttgaaccgaaatggcggggttgatgggctccacaaaatggggacatcaaagaaaagcagtggcactaattaagactgatgccctgcggaaaagttctgcggttgtgcaaaaaaatttcattttcagggcaacttcagttttatcctaatcctggccataccatgacgatgattgtccctgccagcgtcagcaggacgttggcgattgcataggtgcccgcatagcccagcgccgggatgttactgcgagctgtatcactgatgatctccattgccggcgcgcaggtacgtgcgcccatcattgcgccgaacaacagcgcgcggttcattcgcaatacataagcaccgaacaagaaacagataaccacgggcaccagactgacaatcaatccggcaatcaacatctgaccgccaatcgcgcccaggccgttattaataccgctaccggcgctcagaccaacgcctgccataaacaccatcaagccgaactctttcaccatgcttaatgcaccctgcggaatgtaaccgaaggtcgggtggttagcacgcataaagcccagcataattccggcgaataacaacccggcagcgttccccatgccgaaactgaatgtgctgaactggaaggtgatcatcccgatcatcagcccaataacaaagaaggcgcagaatgccagcaggtcagtgacctggctgtgaatgctgataaagccgatgcgatcggcgatggtttttacgcggcgggcatcgccgctgacttgtaaaacgtcacctttgttaagcacgacgttgtcatctatcggcatctcaatctggctacgaatgacgcggttaaggaagcaaccgtgatcggtcaacttcagttgtgcgagacgtttacctacagcgttatggtttttaacgaccacttcttcagtgacgatacgcatgtcgagaaggtcacgatcgaaaacttctttaccgttacggaagctgggatcgagtcgggcatgggcgtcgggatagcctaccaacgctatttcatcgcccatttgtagcacggcatcaccgtctggatttgccagaatcccgttacgtcgaatacgttcaatgtagcagccggtttgtcgataaatacccagttcacgcagatttttgccgtcggtccaggccaccagttccgggccgacgcgataggcgcggatcaccggtaaataaaccttacggttggcatcagtgtccaggccacgttcgcgggcgatttgctgggcgctggtctgtaagtcctgatgctgcaatttcggcaagtaacgcgcaccaacaatcaaactcaccagaccgattaaataggttaaggcatacccgaggctcagattatccagtgccagactgagctgcctgctttccatgccggaatgacgcagtgtatcgccagcaccgaccagaaccggtgtgctcgtcatagagcctgctaacataccggccgtcaggccaatatcccagccaaacagcttacctaaccctaaggcgatcaccagcgcactgccaaccatcaccagtgctaacattaggtaatttttcccatcgcgaaaaaaaatggaaaaaaagttcggtccggcttcgaccccgacgcagaaaataaacagcataaagccaagattaagcgcatcggtgttaatgctgaaatgttgttggcctaataacaggcttacgactaaaacgccaatggaattacccagttggatgctaccaagtcgtaactttccgagacatagcccaagcgcgaggaccacaaataataacagaatgtaattcccatttaacaattcggcgacgtttatattcacggaggctaacttcttgtttactagtaagctgttgaaagaaatggtaatttacgataatgttttttaccagaattcagggcgcagattcattcagcgcacctaaacgatagtaaagtaacaatatattttactagtgtaatcacattaggtatcaacggctatatgaattgcgttggcctatattagcatggaatgcgaagcggctttatcttactgaacgccacactggcgaaaaatgtgttcgatagacgcagtgtcaggaggaacgagtgaaacataaacaacgttgggcgggggcaatctgctgttttgtcctcttcattgtggtgtgcctttttctggcgacgcacatgaaaggcgcttttcgggctgccgggcatcctgaaatcggcttgctatttttcattcttcctggagcagtcgccagcttctttagtcagcgtagagaagtcctgaaacctctgtttggcgcaatgctggcggcaccctgtagcatgctcattatgcggctgttttttagtccgacgcgcagtttctggcaagagctggcatggttactaagcgcggtgttctggtgtgcgctgggggcactgtgtttcttatttatcagtagtttgtttaaaccacagcacagaaaaaatcagtaaagccctcaacgcgagggcttgtcagacgatcaggcgtccagattttctttcacccatgcagcaaaatcggtatagccgccgatatgttgctgatcgacaaaaatctgcggcacggtttctacgggtttacctgccttttgttgtagatcttctttagtgatcccttccgcacgaatatctacatactgatactgaaaatcatcgcgttcattgctcaatttctcagccagatcttttgcacgcacacagtaagggcaaccgctacgaccaaaaataacggtttgcattatttctctcctcatagatttatgcctgtaatgatcacgctaaaatgtattcgctgaaagtaggtttaacctgttgcattaattgctaaaagctataactgttaaacacaatacagtgaaaagttttagactgaaggctcactttgcagagggaagcgtatgcgcgcgatcggtaaattgcctaaaggcgtgttgatactggaatttatcggaatgatgctactggcggtggcgctgctgagcgtaagcgactccctgagcctgcctgagccattttctcggccagaagtgcagattctgatgatttttctcggtgttttgctcatgcttcccgctgcggtggtggttattcttcaggtggcaaaacgtcttgccccacagctgatgaaccgtccaccgcaatatagtcgtagtgaaagagaaaaagataatgacgccaaccattgaacttatttgtggccatcgctccattcgccatttcactgatgaacccatttccgaagcgcagcgtgaggcgattattaacagcgcccgtgcgacgtccagttccagttttttgcagtgcagtagcattattcgcattaccgacaaagcgttacgtgaagaactggtgacgctgaccggcgggcaaaaacacgtagcgcaagcggcggagttctgggtgttctgtgccgactttaaccgccatttacagatctgtccggatgctcagctcggcctggcggaacaactgttgctcggtgtcgttgatacggcaatgatggcgcagaatgcattaatcgcagcggaaagcctgggattgggcggggtatatatcggcggcctgcgcaataatattgaagcggtgacgaaactgcttaaattaccgcagcatgttctgccgctgtttgggctgtgccttggctggcctgcggataatccggatcttaagccgcgtttaccggcctccattttggtgcatgaaaacagctatcaaccgctggataaaggcgcactggcgcagtatgacgagcaactggcggaatattacctcacccgtggcagcaataatcgccgggatacctggagcgatcatatccgccgaacaatcattaaagaaagccgcccatttattctggattatttgcacaaacagggttgggcgacgcgctaaaaccgccacgtcgatgtatgatacgcgggcttttgaccaggtctgacagagaggtgcagggtgaaaattgccatattgtcccgggatggaacgctctatagctgtaagcggctgcgtgaagccgctatacagcgcggtcacctggttgaaattcttgatccgctttcttgctacatgaacataaatcctgcggcgtcttctattcactacaaaggccgcaagttaccccattttgacgcagtgatcccgcgtattggcaccgccattaccttttatgggacggcggcactgcgccagttcgagatgctggggagctatccgctcaatgagagcgtcgccattgcccgggcgcgtgacaaattgcgttccatgcaactgctggcgcgtcagggcatcgacctgcctgtcacgggcattgcgcatagcccggatgataccagcgatttaatcgacatggtcggtggtgcgccgctggtggtcaagttggttgaaggcacgcagggaattggcgtcgtgctggcggagacgcgtcaggcggcggaaagcgtgattgacgctttccgcggtctgaacgcgcatattctggtgcaggaatatatcaaagaggcgcaagggtgcgatatccgctgtctggttgttggcgatgaagtggtcgctgcgattgaacggcgggcgaaagagggcgattttcgttccaatttgcatcgtggcggcgcggcaagcgtcgccagtatcacaccacaggagcgtgaaatcgcgataaaagccgcgcgaacgatggcgctggacgttgctggtgtggatattctgcgtgctaatcgcgggccgttggtgatggaggtgaatgcgagcccggggctggaaggaatagaaaaaaccaccggtatcgacatcgcgggtaaaatgatccgctggatcgaacgccacgctacgacagaatattgcctgaaaacgggtggttaatcgcaatcacattactgatcatggttttgcctgcgctttttgcgtaagctgtgccggtctttttatcgaaagaggttgtacaaaattatgacaagcctggtcgttcctggtctggatacgctgcgtcaatggctcgatgacctggggatgagtttttttgaatgtgataactgtcaggctctgcatctgccccatatgcagaatttcgacggtgtctttgatgccaaaatcgatctgatcgataacacgatcctgttttctgccatggcggaagtccgacctagtgccgtattgccgctggcggcggatttatctgccatcaatgccagtagcctgaccgtgaaagcatttcttgatatgcaggatgataatctgccaaagctggtggtttgccagtctttatccgttatgcagggcgtaacctatgagcagtttgcatggttcgtgcgtcagagcgaagagcagattagcatggtcattcttgaagctaatgcccatcaactgctgttaccgactgatgatgaagggcaaaacaacgttaccgaaaactatttcctccactgataactcctttcgagcacgcagtcgctggtgcagtggctgcgcgctgcaaaattatctgctgtttttaaccttttcttaaagattatttcacttctcttgtgtcgatttggctttatcacatagagcaaatatgcataaaaatttgttaaataccgttttttaatccgagctatagtctcaaaccctggctaaagttattcttgcgatgcttttatatagcgagcagtgctggccgggagaaagttctcttttcttacaccgcgccgataaaaaatatgcacgtttattgcatatctttcagtgtgacaacttttgttcgtttgttaacgaactttcagaaggaaagagatatgaccgccttaaataaaaaatggctaagcggtctggttgcgggtgctctgatggccgtctctgtcggcacgctcgcggctgaacaaaaaacactccacatttataactggtctgattatatcgccccggacacggtggccaattttgaaaaagaaaccggtattaaagtcgtctacgatgttttcgactctaacgaagtactggaaggcaaattaatggccgggagtaccggctttgatctggtggttccatctgccagctttctggagcgccagttgactgcgggagttttccagccgctggacaaaagcaaattgccggagtggaagaatctcgacccggaactgctgaagctggtcgccaaacacgatcccgacaataaatttgctatgccctatatgtgggcgacgaccgggattggctataacgttgataaagttaaagcggtgctgggcgaaaacgcgcccgtcgatagctgggacttgatcctcaaacctgaaaatctggaaaaactgaaaagctgcggtgtctctttcctggatgcgccagaagaagtttttgctaccgtgttgaattatctcggcaaagatcccaacagcactaaagcggatgattacaccggaccggcaacagatctgctgttaaagctgcgcccgaacattcgttatttccatagttctcaatacattaacgacctggcaaacggcgatatttgcgtcgctatcggctgggcaggtgatgtctggcaggcgagtaaccgcgcgaaggaagcgaagaatggcgtgaatgtcagcttcagcattccaaaagaaggggcgatggcgttctttgatgtattcgccatgcctgcggatgccaaaaacaaagacgaagcctatcagttcctgaattacctgctgcgcccggatgtagtagcgcatatttccgaccatgtgttctatgccaacgccaataaagcagccacgccgctggtgagtgcggaagtccgtgagaacccaggtatttatccgcctgcggatgttcgtgcgaagctgttcactctgaaagtgcaggatccgaaaatcgaccgtgtgcgcacccgcgcgtggaccaaagtgaagagcggaaaataatccgcagtcgtagatgccggaggggcgcaccacacccgccggcaattcgcaccattatggtgcgcttgcacacattcaatgccggagagcagccgtgaatgacgctatccctcgcccgcaggcgaaaacccgtaaggcgctgacgccgctattagaaatccgcaacctgaccaaatcctacgatggtcaacatgcggtggatgatgtcagcctgaccatctacaaaggtgaaatcttcgcgctgctgggcgcatccggctgtggcaagtccacgctgctgcgtatgctggcaggtttcgaacaaccttctgccggacagataatgcttgatggcgtcgatttgagtcaggttccgccttacctgcgccccatcaatatgatgtttcagtcttacgcgctgtttccgcatatgaccgtggaacagaacatcgcttttggcctgaaacaggacaaactaccgaaagcggaaattgccagccgggtcaatgagatgctcggcctggtgcatatgcaggagttcgccaaacgcaaaccgcatcagctttccggtggtcagcgacaacgtgtggccctggcccgaagccttgcgaagcgcccgaaactattactgctcgatgagccgatgggcgcgctggataaaaagctgcgtgacaggatgcagcttgaagtggtggatattctggagcgcgtcggtgtgacttgtgtgatggtcacccacgatcaggaagaggcgatgaccatggcggggcgcatcgccattatgaatcgtgggaaatttgtccagattggcgaaccggaagagatctacgagcatccgactacccgctatagcgccgaatttattggcagcgtaaacgtctttgaaggcgtactcaaagagcgtcaggaagatggcctggtgcttgatagcccggggctggtgcatccactgaaagtcgacgcggatgccagcgtggtcgataacgtgccggtacatgtggcgctgcgcccggaaaaaatcatgctttgcgaagagccgcccgccaatggttgtaacttcgcggtgggggaggtgatacacattgcctatctcggcgatcttagcgtgcatcacgttcgtctgaaaagtgggcagatgattagcgcccagctacaaaacgcccatcgtcatcgtaaagggttaccgacctggggcgacgaagtgcgtttgtgctgggaagtggacagctgtgtggtgctgacggtttaaggagcaaagatgagtacacttgaacctgctgcccagagcaaaccgccgggcggatttaagctgtggttgagccagctgcaaatgaagcatgggcgcaaactggtcattgcgttgccatatatctggttgatcttgctgtttctgctgccatttctgattgtctttaaaataagcctggcggagatggcgcgcgctattccaccttataccgaactgatggagtgggctgacgggcaactgtccatcactcttaatctcggtaattttctgcaactgaccgacgatccgctctatttcgatgcttatctccagagcctacaggtggctgcgattagcacattttgctgtttactgatcggctatccgctggcgtgggcggtggcgcacagtaagcctagcacccgtaatattttattactactggtgatcctgccgagctggaccagctttctgatccgcgtttatgcctggatgggaatattaaaaaacaacggtgtgctgaataattttctgctgtggctgggggttatcgatcaaccgctgaccattctgcataccaatctggccgtttatatcggcattgtttacgcttacgtgccgtttatggtactgccgatttataccgcgttgattcgtattgattatagcctggtggaagcagcgctggatctcggtgcacgaccgctgaaaacgttctttactgtgatcgtgccgctgactaaaggtgggattattgccggaagcatgctggtgtttatcccggctgtgggcgagtttgtgatcccggaactgctcggtggcccggacagcatcatgatcgggcgcgtgctatggcaagagtttttcaataaccgcgactggccggtggccagcgcggtagcgatcatcatgttgctgctgctaattgtgccgataatgtggttccacaaacaccagcaaaaaagcgtgggagaacacggatgaataatttaccggtagttcgtagcccctggcggattgtgattttgctgctgggctttacctttctctacgcgccaatgctgatgctggttatctatagctttaacagcagcaagctggtgacggtgtgggccggctggagtacgcgctggtatggtgagttattgcgcgatgacgcgatgatgagtgcggttggtttaagtctgacaattgcggcctgtgcggcgacggcggcggcgatcctcggaactattgcggcggtggtgctggtgcgctttggcaggtttcgcggaagtaatggctttgcctttatgatcaccgcgccgctggtaatgccagatgtcatcacgggcttgagcctgttgttattattcgtcgcgcttgctcatgccattggctggcctgcggaccgcggtatgctcaccatctggctggcgcatgtcactttttgtacggcttatgtggcggtcgttatttctagtagattgcgggaactggatcgcagcatagaagaagcagcgatggatctcggtgcgacgccgctgaaagtgtttttcgtcattacgctaccgatgatcatgcccgcgatcatttctggctggttactggcttttactttgagccttgatgatctggtgatcgccagctttgtttccgggccgggagccaccacgttaccgatgctggtcttttccagcgtgcggatgggggtgaatccggaaatcaacgccctggcaacattgatcctcggcgcggtcggaattgtcggatttatcgcctggtatctgatggctcgcgcagaaaaacagcggatacgcgacatccagcgtgcaagacgtggctgaagacactaaaatttgccaacctggctacataatgccgcgcatgtcgcggcattgttttcatggaagacgaaacgttgggattttttaagaaaacatctagttctcatgctcgcctgaatgtgcctgcgctggtgcaggtggcggcgctcgccattattatgatccgtggcctcgacgtgctgatgattttcaatacgctgggcgtgcgcggtattggcgagttcattcatcgcagcgtacaaacctggagtttaacgctggtctttttaagcagtctggtgctggttttcattgagatctggtgtgcgtttagtctggtgaaagggcgtcgctgggcgcgctggctatatctgctgacacaaatcaccgccgcaagttacttgtgggcggctagcctggggtacggttatccggagctgttcagcattcccggtgaaagtaaacgtgaaatcttccatagcctgatgctgcagaagctgccggatatgctcatcctgatgctgctgttcgttcccagcaccagtcggcggttcttccagttgcaataatgtgtataatcgtcgcccctgatgatgtgaaggtcaatgtatgcagtgcgcactttacgacgcgggtcgctgtcgttcctgtcagtggataatgcagccgattccagagcaactctccgctaaaaccgccgatcttaaaaatctgctcgccgactttccggttgaggaatggtgcgcgccggtgagtggcccggaacaagggtttcgtaataaagccaaaatggtggtgagtggtagcgttgaaaaaccactgctcggtatgctgcatcgcgatggcacaccagaagacctttgtgactgcccgctttatcctgccagttttgcgcccgtttttgcggcgctaaaaccgtttatcgcccgagcggggttaacgccctacaacgtggcgcgtaagcgtggcgaactgaaatacattctgctgactgaaagccagagtgatggaggcatgatgctgcgctttgtactgcgttctgataccaagctggcgcaactgcgtaaggcgctgccgtggttacacgaacaactaccgcagctgaaagttattaccgtcaatattcagccggtacatatggcgattatggaaggggagacggagatctacctgaccgaacaacaggcactggcggagcgttttaatgacgtaccgctgtggatccgtccgcaaagtttcttccagactaatccggcggtcgccagccagttgtacgccaccgcgcgcgactgggtacgacagctgccggttaaacatatgtgggatctgttctgcggtgtggggggctttggtttacactgcgcgacgcctgacatgcagttaaccgggatcgaaattgcaagtgaggccattgcctgtgcaaagcagagtgccgctgaactgggcttaacgcgtttgcaatttcaggcgctggactccactcagtttgccaccgctcagggggatgtgccggagctggtgctggttaacccgccgcgccgcggcattggtaaaccgctgtgtgattatctcagtacgatggcaccgcgttttatcatctactccagctgtaacgcccaaactatggcgaaagatatccgcgaactgcctgggtttcgtattgaacgggtgcagcttttcgatatgttcccgcataccgcgcactatgaagtgctgacgctgctggtgaagcaataaaaaagccgcatgtgcggcttcagattgctgacaaagtgcgcgttgtttatgccggatgcggcgtaaacgccttatccggcctacaaaagcgtgcaaattcaatacattgcatgggccatgtaggcctgataagcgtagcgcatcaggcaattttacctttgtcatcagtctcaagccgcggttgcggctttctgaatcttactgtgggaaccactggtcactgattttttgataagtaccgtcagctttaattgctgccagcgcgttattcagtttttccagcagggctttgttatccggacgtacagcgatgcccaggccggtgccaaaatattgcggatcggtcactttctcagtagcaacaccaagttgtggattggttttcagccattcgtttaccaccgctgtgtcaccaaataccccatcaatacgaccatttttcagatcgataaaggcattctgataactgtcataagagacagttttcacttccgggtgctgatcctgaatatatttctggtgcgtagtaccgttttccatcccaatacgtttgcctttcagatcggcaaacgttttgtaggtatcttttttggcaatcacgacggcactgttttcatagtagggcgtggtaaagcttacctgtttgctacgctccggggtgatatccataccggagattacggcgtcatattttctgaatttcagggacgggatcaggctgtcgaacgcgtgattagtaaaagtacattctgcctgcatttgtttgcacaaggcttttgccagatcgatatcaaagccgacaatctcattattagcacctatagattcaaagggtggataggtggcactaacgccaaaattgattttctctgcggcagaagcaccgaaagtaaaggaagcaagtaaagcggcaagaactaactttttcatgatggaactcccgtctgtcaatcttatgatttttggccgtgtctgcggcatgggataacaatgccatcaagtgaatttatatgcaataaacatgattaaataatttaaatgaaataaaaaagacggacaacttagtgggttgtccgtcttcattataagaatttatgcactatgtaggccggataaggcgtccccgccgcatccggcacaggcaccgtgctgatgtctgatgcgacgctggcgcgtcttatcagacctacaaaaccccccggcgaatgtacgcagccacattaatttcgccgttcgaatgccagcgctttgcgctcgatcagacgcatcatcagcgtcagcaggccgttaacgaccaggtaaataatccctgccgcaccgaacaccattacatcgtaggtgcgtccgtacaacaactggctgtatcccatcacttccatcagcgtaatggtgtatgccagagaggtacttttgaataccagcaccacttcgttggaataagaagagaggctgcgtttaaaggcatacggcagcaggatcgccagcgtatcttttttgctcattcccagggcgctacaggactgccactgaccttccgggatcgcacgaattgcaccgtaaaacagctgcgtggtatacgccgcactattcaggctcaacgcaatcagcgcacataaccacggttcactcaacaaatgccacagtgccggatactcctgcaaagtcggaaactggcccggcccgtaataaatcaggaagatctgcaccagcagcggcgtaccggtaaacagcgtgatataaccccgcaccagccacaccagcaccggcgttttcagcgtcaggatgatggtaaaaatcaatgccagaatcagtgccacaatcaggctggcaacggttagcgtcaggctggtgtgtagccctttcatcagttcgggtaaatactcaaacattagctgggcctccgctcaaaacgtgtcgcgcgcaggtcaatgcgtttgagaatgtactgactgagcagggtgatcaccaggtaaatcgccgccgccacaatgtaccaggtaaatggttcctgggtacgagtagcgatgctttttgtttgcagcattaaatcattcacactaatcaaactgaccagcgcggtatctttcagcagcaccagccactggttaccgaggccaggcagcgcatgacgccacatctgcggcatcaccagacggaaaaagatagcgcttttgctcagccccagcgcctgaccagactcccactgacccaccggcaccgctttcaacgcgccccgaagcgtttggctggcataggcggcatacagcagactcagagcgatgacaccacaaaggaacgggctaacgtcgaagttctcaatgtccatctgcactgggatctgcacgaacccaagattgatagtgaagccatcgctaagcgtcagcagcagctggctggagccaaaatagataaacagcaccaccagaatttctggcaggccacgcagaatggttaccagcgcactacctgcccacgcgacaggacgccattttgcgctctcccataccgcaaagaacatcgccagcgccagcccgacaatcaatgcacaaacggcaaggccgacggtcatcccggcggcgcttgctaaaggaaaaaattcattcatcaggaattacttctggaaccatttgttgtagatggtttcgtaagtgccatctttcttcactttttccagcgcagtgttgagtttctgctgcagctcagtgttgccctgacgtaccgcgatgccgaggccagtgccgaagtaatctttatcggtcactttgtcgcccaccgccgccagtttcgggttatctttcagccactcagtgaccactgcggtgtcaccgaagacgccgtcgatacgcccgttttgcagatccagttttgcgttctggtagctgtcatacggaacggtagtgatttccgggtgcttatccataatgaatttctggtgtgtcgtcccgttctgtacgccgacttttttgcctttcagctgatcaacactggtgtatttgccttgctgacccacaaacagggcagagttgtcatagtacggggtggtaaacagcacctgcttttcacgctccggagtgatatccatgcccgccatcacggcttctacgcgacggaatttcaggcttgggatcaggctgtcaaacgcctggttagagaaagtgcaggttgcatcaatctctttacacagcgcttgtgccaggtcgacgtcaaaaccaacgatctggttgtttgcatcaatgctttcaaacggaggataggaggcttcggtagcaaaacgaatggtttcggcagctgtggcggaaagactaaaacctgcaattaacgcggcaatcagaacttttttcattgttgttatcccgaatcttagtgagagagatagtttttaaatgcttcggtttgcggctcggtaaagcagctcgcgtcgccttgttctacgatatgaccattttccatatacaccactcggctggcggttttacgcgccacttcaacttcgtgggtgacgatcacctgggtaatattcgtttctgccagctcacgaatgatgctgacgatttgtgccgtaatttccgggtccagtgcggcggtcggttcatcgaacagcagtacctgcggttccatcatcaacgcacgggcaatagcaacacgctgctgctgaccaccagaaagatgcagcgggtaacgatcgctataaggtttgagacgcagacgttccagcagtttttctgcacgggccagcgcctgatctttactcaaccccagtacacggcagggcgcttcaatcaggttttgctgcacggtcagatgcggccacaggttgtattgctgaaacaccatgccaacgttacgacgcaaatcgcgaatcgctttgtcagagggtgttttggtgaaatcgaaatggttgcctgcaatgttgagcgtaccggagcgcggcatctcaagcagattgagtacacgcagcaggctgcttttacccgcgccgctggggccaagtaacaccagcgtttcgccctgtgggcaatccagcgtgatatcgaacagcgcctgatgcgcgccgtagaagcaattaatgccgtttaattgaatactcattgacactcgtatactggcagtctgatagctattgaggtcgaagatagtacctttgacagaataattatgcaatatttctgctttaaaagttaaaagcaaagcgcattattcaataaacatagcacaaaataacgggggcggtggtcggcgagcataaatgtcggcattcctcacgaaatgccggacaatttacggggtttattggttgatcaaggcgttagcgattctcgatggactgacggagcgtacccgccgtggcatgaacgctaccgcctaagtaacgcacatcgtcgatgacccaacactggccttcctgaatcattaacacttcatcctgccaaccctggtcaccctgtttgagatccacgcgcaatggaatgttacgggcatcacgattagggatagtgcttgcactggcaacgtgggcgctatctggcaaggtggttcgactggagaatggatcgttggtcagtagttcccgatggttattatcccgggaggcatcgctaagcagtgtcgccagtttgtcgctcagataagggcgcaaggcggtgatgtcgttgctgcggtgcaaaatgcggtagtcataaaattgctgggccacgttatccgggcctccttcaacgcaaggaccactgcgtgtgccgttatctttataagctggagtgactgtggtgcaggcactgaggagcagtgcgcaggggataagcattgtcaatttgctgtagcgcataatgatttccttataagcgatcgctctgaaagcgttctacgataataatgatatcctttcaataatagcgtatcagtctgataatgcttttgagatcgaaggcttagcaaacaaggagatcgatcatgcaattttctacaaccccaactctggaaggccagaccatcgttgaatattgcggtgtggtgaccggcgaagcgattttaggtgccaatattttccgtgatttctttgccggtatccgcgatatcgttggcggacgttccggtgcgtatgaaaaagaactgcgtaaagcacgggagatcgcctttgaggaattaggctcccaggcgcgggcgctgggggccgatgccgtcgtcggtattgatatcgactacgaaacggtcgggcaaaacggcagtatgctgatggttagcgtcagcggtacggcggtgaaaacgcgtcgatgagaagattcttctggctggtcgctgccgctctgttattggcagggtgtgcaggcgaaaaaggcattgtcgagaaagagggatatcagcttgatacccgacgccaggcgcaggcggcgtatccgcgcattaaagtgctggtgatccactacaccgcagatgattttgatagcagcctggcgacactgaccgataagcaggtcagcagccattatctggtccctgcggtaccaccgcgatacaacggtaaaccgcgcatctggcaactggtgccggaacaagaactggcctggcatgcggggattagcgcctggcgcggggcaacgcgccttaacgacacctctattggcattgagctggaaaaccgtggctggcaaaaaagcgccggagtgaaatattttgccccgtttgaaccggcacagattcaggcgcttattccactggcgaaagatattattgcccgttatcacatcaagccggaaaacgtagtggcacatgcggatatcgcaccgcagcgcaaagacgatccggggccattatttccctggcagcaactggcgcagcaggggattggtgcctggccggatgcgcagcgggttaacttttaccttgccgggcgcgcgccgcacacaccggtagataccgcgagtttgctggagcttttggcgcgctacggttatgacgttaaacctgatatgacaccgcgcgagcagcggcgcgtgattatggcattccagatgcatttccgcccgacgttatataacggcgaagcggatgcagaaactcaggcgattgccgaagcattgctggagaaatacgggcaggattaacgcggcagttttccgtggtcgcgtagccaggcggcagttttctcgataccttcatccagggtgatgaccggctgataacctaactcttcctgcgcacgcgtaatatccagcgtaaagtcaaaattcaacttggagacgccgtagtgggtcagcggcggctcttttgcactcttgcggcctaaacgctccatgctgcgggcgatcatatccagcatcgggtaggggacggaacgaatacgacagtcaatattcaactcgtcgatcagcttctgcacgatgctgcgcagtgtgcgatgctcgccgttggtgatgttgtacacacgcccggaaggtagcttatcgcaggcttcctggcttgccagccacattgcgtgcacggcattttcatagtaggtcatatcgaccagcgcactgccgccatgcggtaacagaatactgccgtagtggtgcatcatatgcgccagacggggaataaagactttatcgtgcggtccgaacagactttgtgggcgcagaatagtaaagcgcgtttgtggattcgcctggctaagcatattgatcacttcttcgctggctgctttgctgcgggcaaactcgttggcgaagcggtgagggcgaaaatcttctttaatatcgcgatggtggtgataatcgaagtacagggagggggaagagatatgaataaagttacgcacaccccaggcgacagcccattcacccaggcggcgagtggcgcgaacgttagccagatcgaaagcctgttgtgtcccccagggactggtaaagctggagcagtgccacagcgtatcaatgcccgcgagcatcactttagcttgactactaaccagctcggtcagatccgccggaacaaactctgcgcccattttttccagcaatttgcccattgcctcgttgcgaccggtcgctcgcacgctgatgcctttctggcataaaaactctaccgcgtttcgacctaagccgctggtggcgccggtaaccagtaccttcatatcaatccactgttgttgagaaaataacgtgcgcattcttccgtgatttcccccatgatgcaatgggaaacatgaaagaataacgcaggttttgtcgattaatctgtgctttgttctgccagtctggcgatttgttttgccattccgcgaaaaataaacagatgcgcggggatcatcaataaccagtaaaacagccccggcataccgtgcggatgccagaaagcgcggacatcgatagtacgatagtcgcctttatcttccaggctaaaacacagtcgtcccagccccggcgctttcatgccaaataacaacgtaagttgtttttccggttcaacgacaatcactttccagctatccaccgcatcgccagtctgtaaatattcgcgctccgggcggcctttcgccagcttatgaccgatcgcgcggtccatcaacgcccgtgtctgccacaaaatattgccaaagaaataacgctctttaccgccgatttggttcactacctgccataaagcagcaaggctggcggacgttttaacggtaaaccccgcctgtttggcaaaataaccgtactccggtcgccagcgggcaaaggcctgagcgtcgtagccccagtcgctggagttgaccagtttttcctcctctttcaacgtgctacgtaccgcgtcatcgaaagcgatcagccgttgtgggatgagtgcacgtagcgcggtatcatccgccagcagatcgtgtttcagcccctgaatcaacgccctggcggtggtgggcggtacggaagtaatcacattgagaaaccacacgctaatccagcgggtggggagggggatggggatcaaccagcggcgcttaccgctcaccgccataaaatgttcaaactgttgctgataactgagcacctctggtccggcggcttcgaagatgcggtgttcgctggccggatgatctaacaacgcaaccagatagtgcagcaagttttccagcgcaatgggcgtggtgcgactacgaacccagcgcggaggcgttaagactggcaggttgtagaccatatcgcgcatgacttcgaacgccgcggaacctgcgccaacgataattccggcccgcagttcggtcacgggtacattcgcttcacgcagaatgtccgccgtagcctgacgagcacgcagatgatcgctctgctcatgtggcggggcctgcaagctactaagaaagattaattgcttaactggtacttcacgtagcgcatcgcggacgttgagagccacctggcgctcctgagcgataaaatcgccgccttcgcccatgctgtgcaccagaaaatagaccgtatcgatatcctgcaacagggccggtaggttatccggccagctgagatcgactttatggcaactgacgtttgccagttgcagctttgcaagcctgtcgacatgacgtgccgccgccaggatctgatgcccttgctggctgagtgtgcgcaccagatgctgaccaatgtagccactggcaccgagaactaaaatgcgttgcggcacgtctctctccttaacgcgccaggaatgcacgccagtgggcggcgacttccgccagttgttcgcggctgacgtcaagatgcgtcaccaggcggacaatcgggctggcgttaatcagcacgtttctcgctttcatgtattcgcctaacgcggcagcattttcttccccgacgcgaacaaacagcatattggtgtcctgacgcatcacatccgcgcctgcttcacgcagctgctccgccatccaggcagcgttgtcgtggtcttcctgcaagcgcgcaacgttatttttcagggcatatatcccggcggcagccagaatgccggactggcgcatcccgccacctgtcattttccgccagcgaatggcacgtttaatgtaatcacgattaccgacgagtaaactaccgactggcgtcccaagacctttgctcaggcaaatggtgaagctatcacaatattgcgtgatctctttcagttcgcagccgtaagccaccacggcattaaagatgcgcgcaccgtcaacatgcagcgccagattgcgctcgcgggtaaattcccatgcttctttcaggtattcccgcggcaacactttgccgttgtgggtgttttccagactgagtaatttggtgcgggcgaaatggatatcgtcgggtttgattttcatcgccactttatccagcggtagcgtgccgtcggcagccgcgtctatgggttgcggttgaatactgcccagcaccgccgcgccaccggcttcaaacagatagttatgcgcggcctgaccgacaatatactcttcgccgcgttcgcagtgactgagcagagcgaccaggttggcctgagtgccggtaggcagaaaaatggcggcttctttaccggaaagctctgctgcgtagtcctgcagagcattaacggtagggtcgtctccgtaaacgtcgtccccaaccggggcggccatcatcgcttcgagcatggcgcggcttggtcgggtaacggtatcactgcgtaaatcaatcatggcatgtccttattatgacgggaaatgccaccctttttaccttagccagtttgttttcgccagttcgatcacttcatcaccgcgtccgctgatgattgcgcgcagcatatacaggctgaaacctttggcctgttcgagtttgatctgcggtggaatggctaactcttctttggcgaccaccacatccaccaacaccggaccgtcgatggagaaggcgcgttgcagggcttcatcaacttcagacgctttttctacacggatacccgtaatgccgcacgcttcggcaatgcgggcaaagtttgtgtcgtgtagttcggtgccgtcagtcaaatagccaccagctttcatctccatcgccacaaagcccagcacgctgttgttaaagacgacaattttcactggcagtttcatctgcactacactgaggaaatcgcccatcaacatgctaaaaccgccatcgccgcacatggcgaccacctgacgttctggctctgtcgcctgcgcacccagcgcctgcggcatggcgttagccatgctaccgtggttaaagctacctaacaggcgacgcttgccgttcatttttagataacgtgccgcccacaccgttggcgtaccaacgtcacaggtgaaaatagcgtcatcggcggcaaaatgactaatttgctgcgccagatattgcgggtgaatggctttctcgctcggtttagctaaatcgtccagccctttgcgggcgtcgcggtaatcttccagcgctttatccagaaacttgcgatcggctttttcttccaccaatggaagcaatgcacgcagagtgctcttgatatcgccgaccagtgccatatccaccttgctgtgagcgccgatgctggctgggttgatatcaatctgaatgattttggcatcggtcgggtagaaggcgcggtagggaaattgcgtgccgagtagcactaacgtgtcggcgttcatcatggtatggaaaccactgctgaagccgattaacccggtcattccaacatcatacggattatcgtattcgacatgttctttaccgcgcagggcatgaacaataggcgctttaattttcccggcaaactcaactaactctttatgcgcccccgcgcagccgctgccacacatcagggcgatattgctggaataacgcagcagttgcgccagtttgcgtaactcttcttcttccggcgtcacgactggttgtggcgcatgataccagtgcatggttgccccttctggcgcaggttttaacgccacgtcgcctggtaacacgacaacgctaacgccacggttaagcaccgctttgcgcatggcaatcgccagtacttgtgggatctgctccgggctggaaaccagctcgcaatagtgactacattcgcggaatagctcttgtgggtgggtttcctggaaatagccgctgccaatttcgctggagggaatatgagcggcaatcgccagtaccggaacgtgattgcggtggcaatcgaacaggccgttgattaagtgcaggttgccggggccgcagcttccggcgcagaccgccagttctccgctaagttgtgcttcagcgccagcggcaaaggccgccacttcttcgtggcgggtggacatccactcgatggtgcccatgcgattaagactgtcactaagaccgttcagagagtcgcctgtgactccccagatgcgtttcacccctgcgctttcgagtgttttggcgatataagctgcaaccgtttgtttcatggttctccatctcctgaatgtgataacggtaacaagtttagttcatctgacggagggggaagggatgggagagaaaggaggcactaacggttaaatagcccgatgaaaggaatatcatcgggcataaggcgattatgcgagaaccaaatccccctgcggatggcaggagcaggccagtacgtaaccttcagcgatttcggcgtcggtcagcgtcattgtgctgctcaccgtatattcaccggaaaccacttttgtcttacagcagccgcaaacacccgcacggcaggcagcgacaaccggaacgttattgctttccagcgcctccagtagcgtggtgccaaccggggcgtaaaattctcgtgccggttgcagtttggtgaatttcagaccgctggtcgccgcttctgctactggggtgaagaatttctctttaaagaaacgcgtcacgccgagcgctttcacttcctgctctacccaatccatatacggagccgggccgcaggtcatcacggtacgactagctaagtcaggtacacctgccagcagttcgcgagtgagacgaccagcgataaagccttcggtaacgttattttctgccaccagcgttaccggatagttacgccactcatcggcgaaaataacatcctgcggcgtacgcacgttgtagatcacccgcacatcggcctgtggacggttcttcgcaagccagcgacgcatgctcataatcggcgtgacgccgcagcctgccgccagcaacaggaatttatcttctgctttatcgtcgcaggtaaattcccccatcgcgtcgctaagccagagataatcaccgcgttttacatcgcgcgtcagccactgggagccgacaccgtcatcaatccgccgcacggtcagggtgatatattcactcacgcctggcgtggaggaaatggtgtaagcacgcagcgtttccgcactgtttcgcacgctgaccagtgcatattgcccggcgcgatatgggtagtaatcgtggcaaatcagggaaatcgtccacacatccggcgtttcttgcgtaatgtgatgaacctgcatccgccacgggcattgattcgttggcatcgtcatcgacaaactccttacgcgctcaacagttgcttcatgtcttcttcaacagtggtgatagaacgcaggccgaatttctcgttcagcaccgccagcaggtctggtgtcaggaaaccaggtgcagtcgggccggtgacgatatttttcacgcccagagaaagcagcgtcagcagaatgacgatcgctttctgttcaaaccaggagagcaccaggctcagcggcagatcgttgacaccgcagcccagtttctctgccagagtgacagccagaataatcgcactgtaagcatcgttacattgacctgcatctaccagacgcggcagaccttcgatatcgccaaactcaagtttgttaaagcgatatttaccacaggcgagggtcaggatcaggcagtcatccggcacgctggtggcgaaatcggtgaagtagtggcgctcgccgcgtgcgccgtcacagccaccaagcaggaagatatgacgcagtttttcacggctcaccagatcaatcagcgtatcagcagcgccaagcagcgtctggcgaccaaaacccacggtgataaggtgcggaatttcgctgtacgggaagcctgccatctgttgcgcctgggtgataaccgcagagaaatcatcaccgtccagatgacgcacgccaggccagccaacaatgctgcgggtccagatacgatcgtcataagcgcctacggttgggtcgatgatgcagttgctggtcatcacgatggggccagggaaacgagcgaactccacttgctgattctgccagccgctgccgtagttaccgaccagatgcttgaatttacgcagctccgggtagccatgcgcaggcagcatttcgccgtgggtgtagacattaacgcccgtgccttcggtctgttccagcaggttgtagagatctttgagatcgtgaccggaaatcagaatgcatttacccgccgtcgctttgacgttgacctgggttggcgtcgggtgaccgtatttaccggtttcgcctgcatccagaatgctcatcactttgaagttcatctggccgatttccatactacactcaagaagcgcgttcatatcggcaggccaggtccccagccacgccatgattttatggtactgggcataaatatcgttgtcgtattgaccgagaacatgcgcgtgttccatataggccgccgcacctttcaggccatacaggcacagcagacgcaggccgagaatgttttcgccaatcgccgctttatctttgttaggggtaaattctgctgcctgacgttgcagctcgccgagatcgtcgctcaccagttgcaggtcagccatcgggttatcgacgcgcgcgttggcatctacagccaggcattgcgctttcagcgcctcgcgcagggcaatcgcttcacgagcgtagccgacaatacgcggagaatcgaagttaacgttggtcagggtactgaaaaaggcacgtggcgcgaagctgtcaacatcgtggttgatgatgccgtattcacgcgcttttaccgcccaggcagaaagcccttgcagcgccgcgatgagtaaatcctgaaggtcagaagtttccgccgttttaccacacatcccctgcgcgtaactgcagccgtttcctgccggagtacggatagtttgttcacattgcacacaaaacatgatcacaccttttaaagttatatttaatatacatgtttaaggttaagacgcttaacgcggggataaaagggatttttcatgcaactttaagggagattgatttagcgcaattttggcggcagggatctaccgccagagaggtattacgcagagaaaaaggcgatgaggatcggcactaacaggctaagaataaaaccgtgaacaattgccgccgggaccatatccagcccgccagtacgttgaagaacgggcagggtgaaatccatacttgtggcaccgcataagcccagtgcagtagagcggctgcggcgaatcagcccagggatcaacataatagcaatcagttcacgggccagatcattaaaaaacgccgcgctcccgattaccggaccaaaagattcggtcaataaaataccggaaagagaataccagccgaaaccggaggccattgccagcgcggtattgatggggagatcaagaataaaggcgttaattaaaccaccaattaaactactgacaaccaccaccacggcgacaatcattccccggcgattaaggacaatctgctttaaggtcatgccattattgcgcaactgaataccaacgaggaaaagtagcaaaattaacgtgtattcactggcttcggtcgcgtgttgtaagaaagccagtccacttagaccaatggcaaaaccaatcactactacgccgcacagttttaggctctccagcgccatcgcaatacggctcgggagtttttcttgctgatggtggttgcgccacggcaggcctcgctccagccacatcagggcggcaatattacacagtaaaataacggtaatactgacggcagaataatgcagaatcgccaacaggttactggcgaggttatcgagaaacgccagactgatacccataaaaaagagaataaggtaaaccatccagcttaatagctgattaataacttttaacgcagcttgttggcgaagcggaatgaggtaacccacaatcaggggaaccagaatgattaacagcccagaaaacatgaaaacccagtccttgcaaagatgaagtcgaaatgcgcgatgacacactactgaaagcggaaggacgagtaaagttgcaattaaaaggaaatgttatgcataaggagcagtagagtattcgttttcatttaaagatattcttgcgctttaattacaaactgcaccgatgttggtggcgtcaaaatcgccgaggcgttccctgaaggccggggcagcccacatggatgtgggctgagggcgcgttttacagggatgttacctcgcgcccgacccggtagccgtaagggataagtcgagggcaccgcgcagcggcgattttgttcgccagagcccgggggtgcagggggcggcggcgattggccgccccctgcgcgctccttgcgccagtggcaatatgttgcttagctcatgaaaggagcgcaacaagatgatgaatcaacatataacaacatcttaaaaaaaggcctgacattacgccaggccttctgcgttaattaatcacgcttttccagcagggtccggtaaatcagaccaccgataatgccgccgacaattggcaccacccagaagaaccacagttgttctaatgcccagccgccctggaagatagcaaccgcggtgctgcgcgccgggttaacagaagtgttagtcaccggaatactaattaagtgaatcagggttaaggccagaccaatagcgatcggcgcaaaacctgccggcgcgaatttgtcggttgcgccgtggatcaccaacaggaaacctgcactcaataccagttcaactaccagcgcggaaagcatggaataaccgcctggactatgctcgccataaccgttagaagcaaaaccgctggctgccgcgtcaaaacccgttttaccactggcaattaaatacagcagcgccgctgcaacaataccgccgacaacctgggcaattacgtagccaacgacttcttttgccggaaaacgtccgccagcccataaaccaatagtgaccgccgggttaaaatgaccaccagaaatatgaccaacagcaaaggccatcgtcagaacggtcagaccgaacgccaacgccacgccggcaaaaccaatgcctaattccgggaagcctgcggccagtacagcactaccacagccaccaaaaacaagccagaaagtaccaaaacattcagctgctaattttctgaacatatccaccacaattaaaaattgaccctgtgaaaaatatggtcgttttatagggtcgtcgtaaaaaagtgacgacggaaataatgcgcggctattttaaaaacgaaggcgagtcattcaccagataaataaatccagtaaatttgatttagggcaacagcgggttgccccatatagtcatttgtctgattgacagtgtagtgcacgcaaaagatttaatcctttaggcgtaataaaaaataatttatcatgctaattatttgattttgttgtttttgcagacttatcagcaagagggagtataacgcgattattcgctcatttttcagacatttgccatgcttaaatgtgatgtcatcacgtattagcaaggcctttcccgttatactgccagcgtaaaggataagtcacatatttctggaggggatatgattcttgagcgcgttgaaattgtgggttttcgcggtatcaaccgtttgagcttgatgctggaacaaaacaacgtcctgattggggagaacgcgtggggtaaatccagcttgctggacgccttaactctgctgctaagcccagaaagtgatctctaccattttgagcgcgacgatttctggttcccgccgggagatatcaacgggcgagaacatcatctgcatattattttgaccttccgcgaaagcctgccaggccgacatcgggttcgccgttatcggccgctggaagcgtgctggacgccatgcaccgatggctatcaccgtattttttatcgtctggaaggggagagtgcggaagacggcagcgtgatgacactgcgcagttttctcgataaagacggacatccgattgatgtcgaggatattaacgatcaggcacgccatctggtgcgtttaatgccggtgctgcgcttgcgtgatgcccgttttatgcgccgtattcgtaacggcacggtgccaaatgtccctaatgtggaagtcaccgcgcgccagctcgatttcctcgcccgtgagttatccagtcatccgcaaaatctctctgatgggcagattcgtcagggactttccgcaatggtacagctgcttgagcattatttctctgagcagggggccggacaggcgcgatatcgtttaatgcggcggcgagccagcaatgagcaacgaagctggcgctatctggatatcatcaaccggatgattgaccgacctggtgggcgcagctatcgggttattttgctcggcctatttgctactttgttgcaggcaaaaggcacattgcgactggataaagacgcccgtccattgttgctgatcgaagatccagaaacccgtttacaccccattatgcttagtgttgcctggcatctgttgaatcttctgccattgcagcgcattgccaccaccaacagcggtgagttgcttagcttaacgccggtagagcatgtttgccgactggtacgtgagtccagccgcgttgccgcctggcgtctggggccgagtggcttgagtaccgaagatagccgacgcatatcctttcacattcgttttaaccgtccgagtagcctgtttgcacgctgctggttgctggtggaaggggaaacggaaacctgggttatcaatgaactggcgcgtcagtgcggacatcattttgatgccgaagggatcaaggtcattgagtttgcccagtccgggctaaagccactggttaaatttgcccgccgaatggggattgaatggcatgtactggtcgatggcgatgaagcagggaagaaatatgccgctacggtacgcagcctgttgaataacgatcgggaagccgaacgagaacatttaacggcgttaccggcgctggatatggaacattttatgtatcgccagggattttccgatgtgttccaccgcatggcgcaaatcccggaaaatgtaccgatgaatctacgcaaaattatcagcaaagcgatccatcgctcttccaaacccgatcttgccattgaagtggcaatggaggcaggacgtcgtggtgtggactccgtaccgacgctgctgaaaaaaatgttcagtcgcgtgctgtggctggcgcgcggtcgcgcggattaaccgcgaaacatcgtggccatttgtggctgaatagcgtcgagcatctcatagcgccgacggtattcagcccgttttttactggcgatttcggcaatctcttttcgtgctatctgtgctggaaggcggtaatggcgttcagcatcacatacgccgccaacgctttcccagaaagcgttgtaatcagcgtggatcttgccttctttatcgcgataacgcaggctgcggtaaatatgcgtttcattgctgacggcaataatctgctctacctgcaaacgttgggcaaacagacaggccgcttccatcacgaggcgtttgggaaatagcccgtggcaggctttcgtcgcattctggatttcctgatgtggaatttcccattttgcgccttgcagtccgccaataaacatcgttcttttcccctgatattcacacagggtaaacgtgatctctgccagaggaataccttcgctgttgcggaacaggattgtgctgtcaccttctttatccatactgatcatcatggtcagctcaagcgtgaactgctcgccgtttttgccttccagcttcgccagttgcagcccgggggtattcaaatataagctgaattcttccgcgctcatacattcgcggagtaacgcataatggtaacgtaacgcctccagcaattgcttacggctaagattcgccgcaaggtaagggcgatgcagacgcacaggcagtcgcggctggcgcgttaacaatacattgagattaggccagtgggaaagttcgttcatccactcaacgcttaaacgcggcataatcaagctgcgcagcaaaaatttctggcgaaaactacggcgatgccagaatttacccggccgacactgtccacgtgccagactaagaaaaagactcaggctgctgagagattcagatggcgtaaaggtccgttcagttagctggctcatattcatgaaatcaatggttatacatggcgtgcttttcaccattgcgtatcttaaccaaacatcaatagtgtgattactaacgtaaattttagggttttgttgatatttcgttgaagttaatgacccggattggcatatggagtattcagaaaatttatgaaaaagcggaaaaccgtgaagaagcgttacgttattgcgctggtgatagtcatcgccggactgattacgttatggagaattcttaacgcacccgtgccgacttatcagacgctgattgtgcgccccggtgatttacagcaaagcgtgctggcgaccggaaagctggacgcgctgcgtaaggttgatgtgggcgcgcaggtcagcggtcagttgaaaactctgagcgtggcgattggcgataaagtaaaaaaagaccagcttttaggggttattgatcctgaacaggctgaaaaccagattaaggaggtcgaagcaacgctgatggagctacgtgcgcagcggcagcaggcggaagcggagctgaaactggcgcgggtgacgtattcccgtcagcaacgtctggcacaaacgaaggctgttagtcagcaggatctcgacaccgccgcgacggagatggctgtgaaacaggcgcaaattggcaccattgacgcgcaaatcaagcgcaatcaggcttctctcgatacggctaaaaccaatctcgattacactcgcatcgttgccccgatggccggggaagtcacgcaaatcaccactctgcaaggccagacggtgattgccgcacaacaagcaccgaacattctgacgctggcagatatgagcgccatgctggtaaaagcgcaggtttctgaagcggatgtaatccacctgaagccggggcaaaaagcctggtttacggtgcttggcgatccactgacgcgctacgaggggcaaatcaaggatgtactaccgacgccggaaaaggttaacgacgctattttctattacgcccgttttgaagtccccaaccccaatggtttgctgcggctggatatgactgcgcaagtgcatattcagctcaccgatgtgaaaaatgtgctgacgatccctctgagcgcgttaggcgatccggttggcgataatcgttataaagtcaaattgttgcgtaatggtgaaacacgcgagcgtgaagtgacgattggcgcacgtaacgataccgatgttgagattgtcaaagggcttgaagcgggcgatgaagtggtgattggtgaggccaaaccaggagctgcacaatgacgcctttgctcgaattaaaggatattcgtcgcagctatcctgccggtgatgagcaggttgaggtgctgaagggcatcagcctcgatatttatgcgggtgagatggtcgcgattgttggcgctagcggttccggtaaaagcaccctgatgaatattctcggctgtctggataaggccaccagcggcacctatcgcgtcgccggtcaggatgttgccacgctggacgccgatgcgctggcgcaactgcgccgcgagcatttcggctttattttccagcgttaccatttgcttagccatttaaccgccgagcagaacgttgaagtacccgccgtctatgctggtcttgagcggaaacagcgactgcttcgtgcccaggagttgctgcaacggctggggctggaagaccgtacagagtattatccggcacagcttagcggtggtcagcaacagcgcgtcagcatcgcgcgggcattgatgaacggtggtcaggtaattcttgccgatgaaccaaccggcgcactggacagccattctggcgaagaggtgatggcgatcctgcatcagctgcgcgatcgtgggcatacggtgattatcgtcacccacgatccgcaggtcgctgctcaggccgagcgggtgatcgaaattcgcgacggcgaaattgtgcgcaatcctcccgccattgaaaaagtgaatgttactggcgggacggaacctgttgtcaacacggtgtctggctggcggcagtttgtcagcggttttaacgaggcgctgacgatggcatggcgggcgctggcagcgaataaaatgcgtactttactgaccatgctggggattattatcggtattgcgagcgtggtttccattgtcgtggtgggtgacgccgccaaacaaatggtgctggcggatattcgttctattggtacgaatactattgatgtctatcccgggaaagattttggcgatgacgatccgcaatatcagcaggcgctgaagtacgacgacttaatcgccatccaaaaacaaccgtgggtcgccagtgccacacctgccgtcagccaaaacctgcgcctgcgttataacaatgttgatgttgctgccagtgccaatggcgtgagcggcgattattttaatgtctatggcatgaccttcagtgaaggaaacacctttaatcaggagcagctgaacggtcgtgcgcaggtcgtggttctcgacagtaatactcgccgccagcttttcccccataaagcagatgtggttggcgaggtgattctggtcggcaatatgcccgccagagtcattggtgtggcggaagaaaaacagagcatgtttggtagcagtaaagtgctgcgtgtctggctaccttacagcacgatgtccgggcgagttatgggccagagctggcttaactccattactgtcagggtgaaagaaggatttgacagcgccgaggcggaacagcaactcacgcgtttacttagtctgcgccacggaaagaaggatttctttacctggaacatggacggcgtcttgaaaactgttgaaaagaccacacgtactttacaactgtttctgacgctggtggcggtgattagcctggtggtgggcggtattggtgtaatgaatattatgctggtgagtgtgaccgagcggacgcgggaaattggcattcgcatggctgtaggtgcgcgagcaagcgatgttttgcaacagttcctgatcgaagccgtactggtttgcctggtcggtggcgcgttgggaataacactgagtctgttaattgctttcaccttgcagcttttcttacccggctgggagattggttttagtccgttggcgctgctgctggcgtttctctgcagcacggtcaccgggattttatttggctggttacccgcacgaaatgcggcacgactggatccagtagatgctctggcacgagagtaatttttgagataaaaatgccagccgatcgggctggcattttgcctttaggatgtacacaatgagacagaagagttatgcgactgccgcttctacttcgacgggcacaataacactggcgtgattgccttttggcccctggtggacatcaaactgaacggattgtccagcttttagcgttctgtaaccatccatctgaatggtggaataatgagcgaaaatatcttcgccgccgccttcagggcagatgaaaccaaaccctttggcattgttgaaccacttaacagtacccttttccatgcttcgacatccttcgcaaatcttatacaagtaagatggaataaaccggggtcagagagggggctgttcaaaacctcgccaactctagaaatacaatttagagaattagggcgagccgtcaagcatttgacaggggacaaggggcaggtatgaatcaaaaatttgaagcagttaacgctattgacaggaatgtgacagatgtcgctgatgccaacgatagatgatagttatctatcatgtggagtagattggtcaggcaaataagctcttgtcagcggcagggcgttctgccgataaccgtaaccgaagatgataactgacaatgggtaaaacgaacgactggctggactttgatcaactggcggaagaaaaagttcgcgacgcgctaaaaccgccatctatgtataaagtgatattagtcaatgatgattacactccgatggagtttgttattgacgtgttacaaaaattcttttcttatgatgtagaacgtgcaacgcaattgatgctcgctgttcactaccaggggaaggccatttgcggagtctttaccgccgaggttgcagaaaccaaagtggcgatggtgaacaagtacgcgagggagaatgagcatccattgctgtgtacgctagaaaaagcctgaatgcaggcataaaaattgggggaggtgcctatgctcaatcaagaactggaactcagtttaaatatggctttcgccagagcgcgcgagcaccgtcatgagtttatgaccgtcgagcacttgttactggcgctgctcagtaacccatctgcccgggaggcgctggaagcgtgttctgtggatttggttgcgctccgtcaggaactggaagcctttattgaacaaaccacacccgttctgcctgccagtgaagaggagcgcgacacacagccgacgctgagttttcagcgtgtactgcaacgtgcggtcttccatgtccagtcctccggtcgcaatgaggttaccggtgcaaacgttctggtcgctatctttagcgaacaggagagccaggcggcatatctgttgcgtaaacatgaagtcagccgtctcgatgtggtgaactttatctctcatggcacgcgtaaagacgagccgacacagtcttctgatcctggcagccagccaaacagcgaagaacaagctggtggggaggaacgtatggagaatttcacgacgaacctgaatcagcttgcgcgcgtgggcggaatcgacccactgattggtcgtgagaaggagctggagcgtgctattcaggttctctgccgtcgccgtaaaaacaacccgctgctggtgggggaatctggtgtcggtaaaaccgcgattgcggaaggtcttgcctggcgaattgttcagggcgatgtgccggaagtgatggctgactgtacgatttactctctcgatatcggttctctgttagcgggcacaaaatatcgcggcgactttgaaaaacgttttaaagcgttgctcaagcagctggagcaggacactaacagcatcctgtttattgatgagatccacaccattatcggtgcgggtgcagcgtctggtggtcaggtcgatgcggctaacctaatcaaaccgttgctctccagcggtaaaattcgtgtaattggtagcacaacctatcaggagttcagcaacattttcgagaaagaccgtgctctggcgcgtcgcttccagaaaattgatattactgaaccgagcatcgaagaaactgttcaaatcatcaatggcctgaaaccgaagtatgaagcgcaccacgacgtgcgttataccgcaaaagcggtgcgtgcggcggtagagctggcggtgaaatacattaacgatcgtcatctgccggataaagccattgatgttatcgacgaagcgggcgctcgcgcacgcctgatgccggtaagcaaacgcaagaaaaccgttaatgtggcggatattgagtccgtggtggcccgtattgcacgcattccagagaagagtgtttctcagagtgatcgtgataccctgaaaaacctcggcgatcgcttgaaaatgctggtcttcggtcaggataaagccattgaggcgctgactgaagccattaagatggcgcgtgcaggtttaggtcacgaacataaaccggttggtagcttcctgtttgccggccctaccggggtcgggaaaacagaggtgacggtacagcttagcaaagctttgggcattgagcttctgcgctttgatatgtccgagtatatggaacgccataccgtcagccgtcttattggtgcgcctccgggatacgttggttttgatcagggcggtttgctgactgatgcggtcatcaagcatccacatgcggtgctgctgctggacgaaatcgagaaagcgcacccggacgtgttcaatattctgttgcaggtgatggataacggtacgctgaccgataacaacggacgcaaagcagacttccgtaacgtggtgctggtgatgaccaccaacgccggggtacgggaaactgagcgcaaatccattggtcttatccaccaggataacagcaccgatgcgatggaagagatcaagaagatctttacaccggaattccgtaaccgtctcgacaacattatctggtttgatcatctgagtaccgacgtgatccatcaggtggtggataaattcatcgtcgagttgcaggttcagctggatcagaaaggtgtttctctggaagtgagccaggaagcgcgtaactggctggccgagaaaggttacgaccgggcaatgggcgctcgtccgatggcgcgtgtcatccaggacaacctgaaaaaaccgctcgccaacgaactgctgtttggtagcctggtggacggcggtcaggtcaccgtcgcgctggataaagagaaaaatgagctgacttacggattccagagtgcacaaaagcacaaggcggaagcagcgcattaatctgattgttaggtaggttggtcaagtccgtaatctcgaaagaggttacggactttttgtttatggggtggaggaggttcagaccctttttttaatgatgatggtaagttgttgataattagtgctgcgggaaggtaaggataaaaaagggtgctgcaggagaatgggatggttttgctttattaacaacgggctaaacgtgtagtatttgagttcactgccgtacaggcagcttagaaattcacaggtaacatactccacccgcccaccatgttcactgccgtacagacagataaaatgcgaaaaaaaagctcgcactttcgtacgagctcttctttaaatatggcggtgagggggggattcgaacccccgatacgttgccgtatacacactttccaggcgtgctccttcagccactcggacacctcaccaaattgttttgctaccaaacctcatgggtggcaacggggcgctactatagggagttggagtaaaacggtcaagaagaattttaatgataattattgtttgctcatactgtaaacaagttgtgcagtatatctacatcgagacaagttacggacttatacttccaaagtacttcatacatatcacaaaataaaaaggccggttaaaccgaccttttactcgttctttctcttcgcccatcaggcggtaaaacaatcagcgactacggaagacaatgcggcctttgctcaggtcgtacggggtcagttcaacagtcactttgtcgcccgtcaggatgcggatgtagtttttgcgcattttaccggagatgtgtgcagtaaccacgtgaccgttttctaactctacgcggaacatggtattaggcaacgtttcaagaacggtaccttgcatttcaatattgtcttctttggccatctaatcctctggggtatcactaccgtaatttgaaccggcaagataatgccgaagttctgtaaataagtaaagatttgcgcgctaaatcgcaacaaacaggttcggcacattactccgaaaacacacggctaagccgcaccaaaagcgcaacgtataagggagcggtgagataaacgatgggcgttacctgacgcgaaaaattccttatcggcagcggggtaatgagcgtaaccaactctgcgaccgcaattataacactctggggagaaatgtgccgaaaacattcattcttgtggactaaacaagcatcgtggtacccagaaattattcggcaatcgtccgaggcgcatttgattgagataattaaggtaatcccggcggggaatttcgcaggcaccaaggcttgctgtgtgatcgttaaggacctggcagtcgataagcttaccgccatgaccgataaattcctcacagaataccagaagcgccgttttagacgcattttccatccggctgaacatggactcgccacaaaatagcgttccctgggccacgccgtacataccgccgacaagctcatcttcacgccagacttcaatggagtgggcatggccgagttcgtgaaggcgatggtaggcttcgatcacgccacgcgtgatccaggttccttcttcgcgatcgctggcacagccttcaatgacctgaccaaaagcgtaattcatcgtgacacgataggggctgcgtttatgaaatcgcttcatactacggctgatatgcagactttctggccatagcaccgcgcggggatcggggctccaccagaggatggggtcgcctggagaaaaccacggaaaaataccacgctggtaagccattaacaggcgcgcagggctaagatcgcccccaagtgccagcaggccgttaggctcacgtaatgcgccttccggggaagggaaggctatactatggcgagaaagctgaaccaggcgcatgaccgcaaaactccacgcaagtcggatcgttcaataatagcttacaaaccctgcttgaactggtaataacgcccctgtctggcaagcagttctgcgtgagtaccttgctcaataatttgcccgttgtccatcactattatttgttggaaacgagagagtccgcgaagtcgatgggtgaccattaacaccgttttctcacgcatcatttctgcaagcaattcaaggatctggctttcggttgtggcatctaagccttcggtaggttcatccagcaacaccagtggcgcatcatgtaacagcgcacgggcgatagccagacggcgcagttcaccaccggagagctggcgtccgccttcacctaaccaactgttgagacctgcatcctcgagcagcttttccaggccaacgcgacgcaagatctcgctcagagcctcatcactactgccagggctggcgagtaaaagattatcacgcagcgtggcgctaaacagatgcactcgctgaggaacaacgctgatggtctgtcgtagagccgcttcattcaggctggctatggggctatcgttaagcaaaatctcgccctgttgcgggtcccatgcgcgggtcagctgttgtaacagtgtacttttgccgcatccggttcgcccgagaatcgctatatgttccccggcgtttacctgaagagaaatccctttaagtgcctgttgagattgctccggataagtgaactgaacatcccgtaacgtcaggctaacgcgatcggcaacacgagtttgggtatcaggaaaggtgacctccggtttttgatccgttaagtcagagatacgtacggcagaggcaatgacttgccccagatgctgaaatgcacccgttactggtgccagtgcttcaaacgcggctaacgcgcagaagacaaacagggcaattaacgcgccgggttgagcattgccgccaacgccgccagacgccatccacagcatcaggatcaccgctaacgcgccaatgagcagcattatcgcttggctcaatgcggtcagttcagattgacggcgttgcgcttccagccattgaatttctgtattctctagttgcgtgcgataacgatcgctggcaccaaaaatggtcagctcagcttgcccttgcagccaggccgtcagttgttggcgatactgtccgcgaagatgagtcagattttgcccggtgctttttcccgcacgataaaacagcggtggcatcaggaaaagcgtcagtaacataatgccgcccagcgtaaaggcgagggtgaaatcaaggaaacttaacccgattgtcaccaccataatcaccacaaaagcgcccaccagcgggctgataacgcgcaggtaaagatgatcgagcgtatcaacatccgccaccacgcgattgagcaattcgccctgacgatagcgcgccagtccggcaggggagaggggcagcaatttgctgaaggtgtaaatgcgcagatgctgcaacacgcggaaagtcgcgtcgtgacttaccagacgttcaaaatagcgcccggcagtacgggtgattgctgcgccacgcacgcccgcagcgggtagcatatagttgaagctgtacagtccggcaacccccgcaaccgcactggcgctgaggaaccagccggaaagtgtcaacagaccgatactggcgagcagcgtcacaattgccagcacaataccaagacttaacatccatttatgacgtttatacagtgccagatagggtagcaaagcgcgcatttaaatctcctcctgacgatgggccagtaatgtggcgaatgggccaccagccacacttaattccgcgtaacgtccttgctcaataatccggccatcctgcataacccaaatgacatcccagtcagcaagatcttctaactggtgggtgaccattaacgttgtctggcgcagagaggcggcattcagcgcctccattacgcgctgttcactgtgagcatcaaggctggcagcgggttcatccaacagtaataggctacagggatttagtaacgcacgggccaccgccacgcgctgcgcctgccccacggaaaggcgggcagcctggtcgccaacaggcgtatcaacgccttgtgggaggagcggtagaaactcgctgacccaggcgttatccagcgctgcttgtaattcttgttcgctggcatcaggtcgcgccagtagtacgttatcccgcaatgttgctgccggtaattgtgggttttgcccaacccaggagagatgtttacgccaactttctggacttaaatcgcgtaattctatcccgttgattcgtaggcttccctgataactgagaaaaccagaaagcgcgttcagcagactgcttttaccactaccgctgcgaccaaccaacaccgcacgttggcctgctggcaaagtaaagttcagcggtccggccagcgttttaccttccgggctcgtgataaacagctcctcggcctcaatggtcaccggatcggtgcttgctaattccgcctcaccacgttgcggatgggcgagcggggtttccataaacgttttcagactgtcagctgcgccaacagcctgggctttagcatgataaaacgtaccgagatcgcgtaatggctggaaaaactctggcgcaaggatcagggccagaaaacccgcagccagcgtcacaccggtatcgtagtgaccaaaatccagctcgccgagataggaaaaaccaaagtagaccgccaccagagcaatactcaggctggtaaaaaattcgagaatgccggaggataaaaacgccagccgtagcacttccattgtccgttggcggaaatcttcgctagcagaacgaatactttcaatttcagcttcaccacgaccaaaaatacgcaatgtttccatgccgcgcaggcgatcgaggaaatgcccacttaagcgagcaagagcgagaaagttacgtcggttagcatcggcagcccccattccaaccagcgccataaacaacggaattaacggtgcagtgcccagcagaatgagcgccgcagcccagttagaggggaagattgccaccacaatcagcaacggcacgctcactgccagcgccatttgcggcagatagcgtgcatagtaatcatgcatatcgtcaatttgctcgagtaccagcgtcgcccagctccccgcaggtttaccctgaatccacgctggccctgcttgttgcagacggtcgagaacctgacggcggatggcaaagcggatatgctgcccggcgtgataacccacccgttcgcgtaaccagaccacccatgcgcgcagtacaaaggtcagaaccagtaacgtaaagggaagcagcagggcttcacggggaatattctccataatcatatgttgcagaattcgcgccatgaaccaggcctgggcaatgatcaatatgccgctcacaaagcccagcagacgagaaatattcagccaacgttgggagatgacgctttgctgttttaaccagcgggttaactctttttgacgagatttattcattgcacgcttagcaggtgagttatcagaattatttgcagagcaatgttacaacggggaaaaaataaaggcgacccatagtcgcatggtgtcgccttctttacttttgttactgatttgtaaaattattttgcgtcagctaaaccatcgaggtagcgttccgcatcaagtgctgccatgcagcctgtaccggcgctagtaatggcctggcgataaatgtgatccatcacgtcgcctgcggcaaagacgccaggaatgctggtctgggtggcattaccatgaataccgctctgtactttgatgtagccgttttccagttccagctgcccttcgaaaatcgcagtattcgggctgtgaccgatagcaacaaacagaccggcaacgtcgagactctcgatgttatcgctgttttgcgtatcgcgcagacgaacgccagtgacacccatttgatcgccggtcacttcttccagcgtacggttggtgtgcagaatgatgttgccgttctccactttatccatcaggcgcttaatgaggattttttccgcgcggaaaccgtcacggcggtgaatcagatgcacttcgctagcgatgttagacagatacagcgcctcttcaaccgcggtattgccgccgccgatgaccgcaactttctggttgcgatagaagaaaccgtcgcaggttgcacaagcagaaaccccacggcctttaaaggcttcttcagagggcaggccgagatagcgtgcagaagctccggtggcaataatcagcgcgtcgcaagtgtattcgccgttatcgccattcagacggaacggacggttttgcagatccaccttgttgatatgatcaaaaatgatctcagtttcaaacttggtggcatgttcgtgcatgcgctccattaataacggaccggtcagatcgtttggatcgccaggccagttttccacttccgtggtggtggtcagttggccgcctttttccatgccggtaatcagcacaggttgcaggttggcgcgcgccgcgtagacagcagcggtgtatcccgccgggccactacccaggataagcagtttactgtgtttggtcgtgcccatgagatccccatagttgttggcagacaatgggcaggattgtagggaatttacagacgtaaaaaaagagtatgacgattttgttaacaatttgtgcaatcggcagcatcgataagcaggtcaaattctcccgtcattatcacctctgctacttaaatttcccgctttataagccgattaaatgatgaataaacgcccctgttaatgaatatctggcatgttgtactaaaaatcgatgttttgctttgacaatcccctggtgttttgcgaaaacattcgaggaagaaaaaaaacagtattcttatatgcgcataaccatgcatgtaaataccatgtttaccgtgctagtgaaatctacgtatggcgtggacagacgccattcgtgatgtcgatagctgccacaaggcaacggtcttctcaccgtagacccaggcattgcgcgccgtgaatcttcatgatttcggtctatcgtgacgggtagcgactctgaacagtgatgtttcagggtcagacaggagtagggaaggaatacagagagacaataataatggtagatagcaagaagcgccctggcaaagatctcgaccgtatcgatcgtaacattcttaatgagttgcaaaaggatgggcgtatttctaacgtcgagctttctaaacgtgtgggactttccccaacgccgtgccttgagcgtgtgcgtcggctggaaagacaagggtttattcagggctatacggcgctgcttaacccccattatctggatgcaagtcttctggtattcgttgagattactctgaatcgtggcgcaccggatgtgtttgaacaattcaataccgctgtacaaaaacttgaagaaattcaggagtgtcatttagtatccggtgatttcgactacctgttgaaaacacgcgtgccggatatgagtgcctaccgtaagttgctgggggaaaccctgctgcgtctgcctggcgtcaatgacacacggacatacgttgttatggaagaagtcaagcagagtaatcgtctggttattaagacgcgctaacacggaacaggtgcaaaatcggcgtattttgattacactcctgttaatccatacagcaacagtactggggtaacctggtactgttgtccgttttagcatcgggcaggaaaagcctgtaacctggagagcctttcttgagccaggaatacattgaagacaaagaagtcacattgacaaagttaagtagcggccgccgccttctggaggcgttgctgatccttattgtcctgtttgccgtctggttgatggctgccttactaagctttaaccctagcgaccccagctggagccaaacggcctggcatgaacctatccataatttaggtgggatgcccggtgcgtggttggcagatacgctgttctttatttttggcgtgatggcttacaccattcccgtcattattgtcggcggttgttggtttgcctggcgtcatcagtccagcgacgaatacattgattattttgccgttagcctacgcatcattggcgttttggcgctcatccttacctcctgtggtctggcggcaatcaacgctgacgatatctggtattttgcctccggtggcgtcattggcagcttactaagcactacgctacaaccactgctacacagtagcgggggaactattgcgctgctctgcgtttgggcagcgggcctgacgttgttcaccggttggagttgggtgaccattgctgaaaaactcggcggctggattttaaacattctcaccttcgccagtaatcgtacccgtcgcgatgatacctgggtcgatgaagatgagtatgaagacgacgaagagtatgaagatgaaaatcacggcaaacagcatgaaagtcgccgtgcccgtattcttcgcggcgcgctagcgcgtcgtaaacggttggcggaaaaattcattaatccgatggggcggcaaacagacgctgcgttgttctccggtaagcggatggatgatgacgaagagattacctacactgcacgcggtgtggctgccgacccggacgacgtcctatttagcggcaatcgtgcaacgcagccagaatatgacgaatacgatccattattaaacggtgcgccaattaccgaacctgtcgctgtagcagctgctgctaccacggcgacacaaagctgggctgcgccggttgaacctgtgactcagacgccgcctgttgcctctgttgatgttccacctgcgcaacctacagtagcctggcagcctgtaccgggtccacaaacgggagagccggttattgctcctgcaccggaaggttacccacagcagagtcaatatgcgcagcctgcagtgcaatataatgagccgctgcaacaaccagtacagccgcagcagccgtattatgcacctgcagctgaacaacctgcgcaacagccgtattatgcccctgcgccagaacaaccggtggcaggtaacgcctggcaagccgaagagcagcaatccacttttgctccacagtctacataccagactgagcaaacttatcagcagccagccgctcaggagccgttgtaccaacagccgcaacccgttgaacagcagcctgttgtggagcctgaacccgttgtagaagagacaaaacccgcgcgtccgccgctttactactttgaagaagttgaagagaagcgagcccgtgaacgtgaacaacttgcggcctggtatcaaccgattccagaaccggttaaagaaccagaaccgatcaaatctagcctgaaagcaccttctgttgcagcagtacctccagtagaagccgctgccgctgtttccccgctggcatctggcgtgaaaaaagcgacactggcgacgggggctgccgcaaccgttgccgcgccagtcttcagtctggcaaatagcggtggaccgcgtcctcaggtcaaagaggggattggtccgcagttgccacgaccgaaacgtatccgcgtgccaactcgtcgtgaactggcgtcttacggtattaagctgcccagtcagcgtgcggcggaagaaaaagcccgtgaagcccagcgcaatcagtacgattctggcgatcagtacaacgatgatgaaatcgatgcgatgcagcaggatgaactggcacgtcagttcgcccagacacagcagcaacgctatggcgaacagtatcaacatgatgtgcccgtaaacgcagaagatgcagatgctgcggcagaggctgaactggctcgtcagtttgcgcaaactcaacaacaacgttattccggcgaacaaccggctggggcgaatccgttcagcctggatgattttgaatttagcccaatgaaagcgttgctggatgatggtccacacgaaccgttgtttacgccaattgttgaacctgtacagcagccgcaacaaccggttgcaccgcagcagcaatatcagcagccgcaacaaccagttccgccgcagccgcagtatcagcagccacaacagccggttgcgccgcagccacaatatcagcagccgcaacaaccggttgcgccacagcagcaatatcagcagccgcaacaaccggttgcgccgcagcagcagtatcagcagccacaacagccagttgcgccacaaccgcaggataccctgcttcatccgctgttgatgcgtaatggcgacagccgtccgttgcataaaccgacgacgccgctgccttctctggatttgctgacaccgccgccgagcgaagtggagccggtagatacctttgcgcttgaacaaatggctcgcctggtggaagcgcgtctggctgatttccgtattaaagccgatgtcgtcaattactctccggggccggttatcactcgctttgaattgaacctggcaccgggcgtaaaagcggcgcgcatttctaacttgagtcgggaccttgcccgtagtcttagcacggtggcggtgcgtgtcgttgaagttattcctggcaaaccctatgtaggtctggagttaccgaataaaaaacgacaaaccgtttatctgcgcgaagttttggataacgccaaattccgcgataatccgagcccattaaccgtggtgctgggtaaagatatcgccggtgagccggtggttgccgatctggcgaaaatgccgcacttgttggttgcggggactaccggttccggtaaatctgtcggtgtgaacgcgatgatcctgagcatgctttataaagcacagccagaagatgtgcgtttcatcatgatcgacccgaaaatgctggagcttagcgtttatgaaggcattccgcatctgttaacggaagtcgttactgatatgaaagatgccgccaacgcgctgcgctggtgtgttaacgagatggagcgtcggtataaactgatgtctgcgctgggtgtgcgtaatctggcgggttataacgaaaaaattgctgaagccgatcgcatgatgcgtccgattccagacccgtactggaagccgggtgacagtatggatgcccagcatccggtgctgaaaaaagaaccatacattgtggtgttggttgacgaatttgccgacctgatgatgacggtaggtaaaaaagtggaagagctgatagcacgtctggcgcaaaaagcccgtgccgcgggtatccacctcgtactggcaactcagcgtccaagcgttgatgttattactggtctgattaaagcgaatattccgacccgtatcgcctttaccgtatccagtaagattgacagtcgtaccattcttgatcaggctggcgcggaaagtctgctgggtatgggggatatgctctactctgggccgaactccacgttgccggtacgtgtccatggtgcttttgttcgcgatcaggaagttcatgccgtggtgcaggactggaaagcgcgtggtcgcccacagtatgttgatggcatcacctccgacagcgaaagcgaaggtggtgcgggtggtttcgatggcgctgaagaactggatccgttgttcgatcaggcggtgcagtttgtcactgaaaaacgcaaagcgagtatttctggcgtacagcgtcagttccgcattggttataaccgtgcagcgcgtattatcgaacagatggaagcgcaggggattgtcagcgaacaggggcacaacggtaatcgtgaagtgctggccccaccgccgtttgactaactaatgcatcgtatgccggataaggcgcggtagcgtcgcatccggcactctatcaactgaaaattcagtattttcttctttcctcaagctgattattagcctggaatagagagtagagggaactcccgatcgggagtgacgtaatttgaggaataatgatgaaaaaaattgccatcacctgtgcattactcagtagcttagtagcaagcagcgtttgggctgatgccgcaagcgatctgaaaagccgcctggataaagtcagcagcttccacgccagcttcacacaaaaagtgactgacggtagcggcgcggcggtgcaggaaggtcagggcgatctgtgggtgaaacgtccaaacttattcaactggcatatgacacaacctgatgaaagcattctggtttctgacggtaaaacactgtggttctataacccgttcgttgagcaagctacggcaacctggctgaaagatgccaccggtaatacgccgtttatgctgattgcccgcaaccagtccagcgactggcagcagtacaatatcaaacagaatggcgatgactttgtcctgacgccgaaagccagcaatggcaatctgaagcagttcaccattaacgtgggacgtgatggcacaatccatcagtttagcgcggtggagcaggacgatcagcgcagcagttatcaactgaaatcccagcaaaatggggctgtggatgcagcgaaatttaccttcaccccgccgcaaggcgtcacggtagatgatcaacgtaagtaaaggcacctgagtgagcaatctgagcctcgattttagcgataatacttttcaacctctggccgcgcgtatgcggccagaaaatttagcacagtatatcggccagcaacatttgctggctgcggggaagccgttgccgcgcgctatcgaagccgggcatttacattctatgatcctctgggggccgccgggtaccggcaaaacaactctcgctgaagtgattgcccgctatgcgaacgctgatgtggaacgtatttctgccgtcacctctggcgtgaaagagattcgcgaggcgatcgagcgcgcccggcaaaaccgcaatgcaggtcgccgcactattctttttgttgacgaagttcaccgtttcaacaaaagccagcaggatgcatttctgccacatattgaagacggcaccatcacttttattggcgcaaccactgaaaacccgagctttgagcttaatagcgcactgctttcccgtgcccgtgtctatctgttgaaatccctgagtacagaggatattgagcaagtactaactcaggcgatggaagacaaaacccgtggctatggtggtcaggatattgttctgccagatgaaacacgacgcgccattgctgaactggtgaatggcgacgcgcgccgggcgttaaatacgctggaaatgatggcggatatggccgaagtcgatgatagcggtaagcgggtcctgaagcctgaattactgaccgaaatcgccggtgaacgtagcgcccgctttgataacaaaggcgatcgcttttacgatctgatttccgcactgcataagagcgtacgtggtagcgcacccgatgcggcgctgtactggtatgcgcgaattattaccgctggtggcgatccgttatatgtcgcgcgtcgctgtctggcgattgcgtctgaagacgtcggtaatgccgatccacgggcgatgcaggtggcaattgcggcctgggattgctttactcgcgttggcccggcggaaggtgaacgcgccattgctcaggcgattgtttacctggcctgcgcgccaaaaagcaacgctgtctacactgcgtttaaagccgcgctggccgatgctcgcgaacgcccggattatgacgtgccggttcatttgcgtaatgcgccgacgaaattaatgaaggaaatgggctacgggcaggaatatcgttacgctcatgatgaagcaaacgcttatgctgccggtgaggtttacttcccgccggaaatagcacaaacacgctattatttcccgacaaacaggggccttgaaggcaagattggcgaaaagctcgcctggctggctgaacaggatcaaaatagccccataaaacgctaccgttaatgttatcgttgcggtaatgttgttactgtatccctgtggtcgcaggctgtggccacatctcccatttaattcgataagcacaggataagcatgctcgatcccaatctgctgcgtaatgagccagacgcagtcgctgaaaaactggcacgccggggctttaagctggatgtagataagctgggcgctcttgaagagcgtcgtaaagtattgcaggtcaaaacggaaaacctgcaagcggagcgtaactcccgaagcaaatccattggccaggcgaaagcgcgcggggaagatatcgagcctttacgtctggaagtgaacaaactgggcgaagagctggatgcagcaaaagccgagctggatgctttacaggctgaaattcgcgatatcgcgctgaccatccctaacctgcctgcagatgaagtgccggtaggtaaagacgaaaatgacaacgttgaagtcagccgctggggtaccccgcgtgagtttgactttgaagttcgtgaccacgtgacgctgggtgaaatgcactctggcctcgactttgcagctgcagttaagctgactggttcccgctttgtggtaatgaaagggcagattgctcgcatgcaccgcgcactgagccagtttatgctggatctgcataccgaacagcatggctacagtgagaactatgttccgtacctggttaaccaggacacgctgtacggtacgggtcaactgccgaaatttgctggcgatctgttccatactcgtccgctggaagaagaagcagacaccagtaactatgcgctgatcccaacggcagaagttccgctgactaacctggtgcgcggtgaaatcatcgatgaagatgatctgccaattaagatgaccgcccacaccccatgcttccgttctgaagccggtagttatggtcgtgacacccgtggtctgatccgtatgcaccagttcgacaaagttgaaatggtgcagatcgtgcgcccagaagacagtatggcggcgctggaagagatgactggtcatgcagaaaaagtcctgcagttgctgggcctgccgtaccgtaaaatcatcctttgcactggcgacatgggctttggcgcttgcaaaacttacgacctggaagtatggatcccggcacagaacacctaccgtgagatctcttcctgctccaacgtttgggatttccaggcacgtcgtatgcaggcacgttgccgcagcaagagcgacaagaaaacccgtctggttcataccctgaacggttctggtctggctgttggtcgtacgctggttgcagtaatggaaaactatcagcaggctgatggtcgtattgaagtaccagaagttctgcgtccgtatatgaacggactggaatatattggctaatacccaatttttctgaatctaaaaagcgcctgcgggcgctttttttgtctccctttgataccgaacaataattactcctcacttacacgtaatactactttcgagtgaaaatctacctatctctttgattttcaaattattcgatgtatacaagcctatatagcgaactgctatagaaataattacacaatacggtttgttactggaatcaatcgtgagcaagcttgagtgagccattatgaaaacgaaaatccctgatgcggtattggctgctgaggtgagtcgccgtggtttggtaaaaacgacagcgatcggcggcctggcaatggccagcagcgcattaacattaccttttagtcggattgcgcacgctgtcgatagcgccattccaacaaaaagtgacgaaaaggttatctggagcgcctgtacagttaactgtggtagtcgctgcccgctacgtatgcacgtcgtggacggtgaaatcaaatatgtcgaaacggacaataccggcgatgacaattacgacggcctgcaccaggttcgcgcctgcctgcgtgggcgttccatgcgtcgccgtgtctacaatccggaccgcctgaaatatccgatgaaacgagtcggggcgcgcggtgaaggcaaattcgagcgcattagctgggaagaagcctacgacatcatcgcgaccaatatgcagcgcctgatcaaagagtacggcaacgagtctatctatctgaactatggcaccggtacgctgggcggcaccatgacccgctcctggccgccgggaaataccctggtcgcgcggctgatgaactgctgcggcggctatctgaaccattacggcgactactcctccgcgcaaattgcggaaggtttgaactatacctacggcggctgggcagatggcaacagcccgagcgatatcgaaaacagtaagctggtagtgctgtttggtaataaccctggcgaaacgcgaatgagtggcggtggggtgacttactatcttgaacaggcacgccagaaatctaatgcccgcatgatcatcatcgatccgcgctataccgacaccggtgccgggcgcgaagatgagtggatccctattcgtccgggaacagatgccgcactggttaacggtctggcgtacgtcatgatcactgaaaacctggtggatcaggcattcctcgataaatattgcgttggctacgatgagaaaaccctgccagccagtgcgccgaaaaatggccactataaagcttatattctgggtgaagggccagatggcgtggctaaaacgccggaatgggccagccaaatcactggtgttccggcagacaaaatcatcaaattggctcgtgaaatcggtagtaccaaaccggcgtttatcagccagggatggggcccgcagcgtcacgctaacggtgaaatcgcaacccgtgctatcagcatgctggcgattctgaccggtaacgttggtattaacggaggcaacagcggcgcgcgtgaaggtagttacagcttaccgtttgtccgtatgccgaccttggaaaacccgatccagaccagcattagcatgtttatgtggaccgatgccattgaacgtggcccggaaatgacggcgctgcgtgatggtgtacgcgggaaagataagctggatgtgccgatcaaaatgatctggaactatgccggtaactgcctgattaaccagcattctgaaatcaaccgtacccatgaaatccttcaggatgataagaagtgcgagctgattgtggttatcgactgccacatgaccagtagcgcgaaatatgctgacatcctgctgcctgactgcaccgcttccgaacagatggactttgcgctggatgcatcctgcgggaatatgtcttacgtgattttcaacgatcaggtgattaaaccgcgctttgaatgtaagaccatctatgaaatgaccagcgaactggcaaaacgtcttggcgttgagcaacagtttactgaaggccgtacccaggaagagtggatgcggcatctgtatgcccagagccgggaagcgattcctgaactgccaacgtttgaagagttccgcaagcaggggatctttaaaaagcgcgacccacaagggcatcacgttgcttataaagccttccgtgaagatccgcaggcaaacccactgactacgccaagcggcaaaattgagatttatagccaggcgctggctgacattgccgctacctgggaattgcctgaaggcgatgtgatcgatccactgccgatctacacgccgggctttgaaagttatcaggatccgctgaacaaacagtatccgctgcagcttacaggtttccactataaatctcgcgttcacagtacttacggcaacgttgatgtgctgaaagcggcttgccgtcaggaaatgtggatcaacccgcttgatgcccaaaaacgcggtatccacaacggcgataaagtcaggatctttaacgatcgtggtgaggttcatattgaggcgaaagtgacgccacgaatgatgccgggtgtggtcgcactgggtgaaggtgcctggtatgacccggatgcaaaacgtgtcgataagggtggttgtattaacgtactgaccactcaacgtccgtctcctctcgctaaggggaatccgagtcatacaaaccttgttcaggttgaaaaggtgtaaggagtaaccgatgacaacccagtatggattttttattgattccagccgttgcaccggttgcaaaacctgcgagctggcctgtaaagactacaaagatttgacgccagaagtcagcttccgccgcatttatgaatatgctggcggcgactggcaggaagataacggtgtctggcaccagaacgtgtttgcctactatctgagcattagttgtaaccactgcgaagatccggcttgtactaaagtctgcccgagcggtgcgatgcataaacgtgaagatggttttgttgtggtcgatgaagatgtgtgcattggctgccgctactgccatatggcttgcccgtatggcgcaccgcaatataacgaaacgaaaggccatatgaccaaatgcgatggttgttatgaccgtgttgcggagggtaaaaagccgatctgtgttgaatcttgtccgctgcgggcgctggatttcggccctatcgacgagctgcgtaaaaaacatggcgatctggcggccgttgcgccgttgccgcgagctcactttaccaaaccgaatattgtgatcaaacccaatgccaatagccgcccgaccggggataccactggctatctggcaaacccgaaggaggtgtgagatgggaagtggatggcatgaatggccgctgatgatcttcacggtcttcgggcaatgtgtagcaggtggttttatcgttctggctttggcgctgctcaaaggcgacctgcgagcagaagcccagcagcgtgttatcgcctgcatgtttggtttatgggtgctgatgggcattggctttatcgcctctatgctccatcttggtagtccaatgcgcgcttttaacagcctcaaccgggtaggggctagtgcactcagtaacgaaatcgccagcggtagcatcttttttgccgtaggcggcatcggctggttgctggcaatgctgaaaaagctgagtccggcattgcgtacgctgtggctgatagtgacgatggttcttggcgtcatctttgtctggatgatggtgcgtgtgtataacagcattgataccgttccgacctggtacagcatctggacgccgatgggcttcttcctgacgatgtttatgggcggcccgttactgggttacctgttgttgagtctggctggcgtcgatggctgggcgatgcgtctgctgccagcaatttctgtactggcactggtagtgagtggcgtggtgagtgtgatgcagggcgcagagctggcgactattcatagttctgtgcagcaggccgcagcgctggtgccggactatggtgcgctgatgtcctggcggatcgtgcttttggccgttgccctgtgcttgtggattgcaccacagctaaaaggttatcagcctgcggttccgctactttctgtaagtttcattctgcttctggcaggggaattaatcggtcgcggcgtattctatggtttgcatatgaccgtggggatggccgtcgcaagctaatcataacaaccggggtttcggccccggttctcttttatttctgcttcgttaacgtgtcataactggtcatcaaattacgataatcaggaatgtggttagagaacaacgtcgccagtccttcaatatcattacgccagtcgcgatgcagctcgcacgccacgccgaaccatgtcatcaattgcgcaccagcttggctcaagcgatcccatgcgctatgccgggtaatttcattaaaggtcccactcgcgtcagtcacgacaaagacgtcaaacccttcttcaatggcactaagcgccgggaatgccacgcaaacttcggttaccacaccggcaataattaactgttttttacctgtcgctttgacagcttttacaaaatcttcgttatcccaggcgttaatatttcccgggcgagcaatgtaaggtgtatcggggaattgtgctttcagttctggaactaatgggccgttaggaccggtttcaaaactggtggtaagaatagttggtaagttgaaatacttagccaggtcacccagcgccagcacgttatttttaaacttatcgggttcgatatcccgtacaagggaaagtaaaccagcctggtgatcaacaagcaaaacggcagcatcatttttatcaagacgaacatacggtttggtcatcctcttctcctttcgagagtcagtggtacgtctgaaatcgatcagacgcgatgcattgctctgaaagcatagacgggaaatatgagtttgctgtgaccatgaaatttttcgactgaacgaagcgtatgaaatttgtgttagttcaataaaaacaatcagatgagactaatcatctcttcagcattagcgttatgaatgagtaatataaatcgataataccgccgctgggatatcgcgtattttcacccattgacaatgtttttggcggtggcatgatgcgcatgaaatttgaacttcctcacggttttaattcatgtccacgtatacccagcctgtcatgcttttgctgtctggcctgcttttgttgactctggcgattgcggtgttaaatacactcgtgccgctttggctcgcccaggaacacatgtccacatggcaggtaggcgttgtcagcagttcctattttaccggcaaccttgtcggtacattgctgacagggtatgtcattaagcgcattggctttaaccgcagctattatctggcctccttcatttttgccgctggctgtgccggccttggcctgatgattggattctggagctggttggcttggcgttttgtcgcgggcgtcggctgtgccatgatttgggtggttgttgagagcgcgctgatgtgcagtgggacgagtcgtaaccgtgggcgtttgcttgctgcgtatatgatggtttattacgtgggaacgtttttaggccagttactggtcagcaaagttagtaccgagctgatgtccgtattgccgtgggttacaggtttgacgttggcagggatcttaccgctgttgtttacgcgtgtgctgaatcagcaggctgaaaaccatgatagcacgagtattacgagtatgctaaaactccgtcaggcgcggcttggcgtgaatggctgcattatcagtggaatcgttctgggatctctatatggcctgatgccgctgtacctcaatcacaaaggggtgagcaatgccagcattggtttctggatggcggtactggtcagtgcgggtatccttggacaatggccgattggacgtctggcggataagtttggtcgactgctggtgttgcgtgttcaggtctttgtcgtcattctcggcagtatcgcgatgcttagccaggcggcgatggccccagcgttattcatcctcggtgccgctggctttacgctatatccggtggcgatggcatgggcttgcgagaaagttgaacatcatcaactggtggcgatgaaccaggccttactgttgagctatactgtgggaagcctgcttggcccgagttttaccgctatgctaatgcagaatttctccgataatttattgtttatcatgatcgccagcgtaagctttatctatttgctgatgctgctgcgcaacgccggtcatacgccgaaacccgttgctcacgtgtaaatgaattcaagcagagtgtgaacttactgtttcacactctgcttttttgtttcttctatctgacttgctttattccaaattttattcgtttaaaaataaaatgtgcagcaggttataattttgcatttcgctatttccgcacttcttatttgccgcgcataatccctcgttttaccgatgcccctttaattttggcgaaggatttgtctatggctgggaatgttcaggaaaaacagttgcgatggtacaacattgcgctgatgtcttttatcactgtctggggttttggcaacgttgttaataactatgccaaccaggggctggtggttgtttttagttgggtgtttatctttgcactctatttcacaccttatgcgctaattgttggtcagttaggcagcaccttcaaagatgggaagggcggggtcagtacctggattaaacacacgatgggacccggactggcttatctcgccgcgtggacctactgggtggtgcatattccctatctggcacaaaaaccccaggcaattctgattgcgctcggttgggcgatgaaaggcgacggtagcctaatcaaagaatatagtgtcgtagcgttacaggggttaacgctggtgctgtttatcttctttatgtgggttgctagtcgcggtatgaaaagcctgaaaatcgtcggttctgtggcagggattgctatgtttgttatgagtctcctgtatgtggcgatggcggtaaccgcgcctgcaattactgaagtgcatattgcgaccacaaacattacctgggaaacgttcattcctcatatcgactttacctacattaccactattagtatgctggttttcgcggttggcggagcagagaagatttctccttacgttaatcaaacgcgcaacccaggaaaagaatttccaaaagggatgttatgcctggcggtgatggttgcggtttgtgccattctgggcagcctggcgatggggatgatgtttgatagccgtaatatcccggatgacttaatgaccaacggtcagtattacgcctttcagaagctgggcgagtattacaacatgggtaatactttaatggtgatttacgccattgcgaataccctgggacaagtagcggcgctggtattcagcattgatgccccgcttaaagtgctattaggtgatgctgacagcaaatatattccagccagtttatgtcgtaccaacgcttctggtacgcccgttaatggctattttctgaccctggtactggtggcgattctgattatgctgccgactctcggcattggtgatatgaacaatctctataaatggctgttgaaccttaatagcgtagtgatgccgctgcgttatttatgggtatttgttgcatttattgcagtcgttcgcttggcgcagaaatataaaccagaatatgtctttattcgtaataagcctctggcaatgaccgtcgggatttggtgttttgcctttaccgcctttgcctgtttgacggggatcttcccgaaaatggaagccttcactgcagagtggaccttccagttggcgctgaatgttgcaacgccgtttgtgctggtaggattaggactgatattcccgctgctggcgcgtaaagcgaatagtaaataattattgtggtcggtgacgctgactctggcagatctgacccgtttttacataatcgagaaatgcgcgcaagccgcaggacatatactggcggtttggataatagatctggaagcctggacgctctgtgctccagtcttccagtacacattctaaacgaccagtatcaaggtactccttgatctgttcatagagcagatacccgataccagcacccatcaaaacggcctccagttcagcatcaacatcatccagaatgatatttcctgcgacagcaatttccagctcctttgcaaattgccagtggaaaggtttgccgctgggataacgaaaaacaacacattgatgattaagcagatcatgaggatggcggggtttgccatatcttgcaaagtactctggcgttgctgctacacataatttcactggcgggccgatcgccacgctgatcatatctttttcgacgatgcaactaagtcgaacgccagcgtcaaagccctgttggacgatatcgacaagagagtcgtcagttgtgagctcgactttaatatcaggatattcacgtgtgaaaccaaccagtaaagacattaaaaatatacgtgcagctacccgggcggcattgattttgagcgttcctgtcggtgtcagacgaaaatcattcatctcatctaacatgatctgaatttcgtcgaaagctgggcgcaatcgttcatagagattagaacccgcttccgttaagcttacgcttcgggttgtccgattgaataagcgaattttaagacgttgttccagtgttttaatactatggctaatggcggagctggataagcctaactcatcgcccgctgcacgaaagctttgattacgggccacggcaaagaaagtggcaaagtcagacatattcatccgcattagtgaaaatccttcattaactcatcctgaatcatcacgtttacaggattatgccgcctgcgtaaagtgcgctccagaacttaacgtggaggtaaaattatgcagtctgaacgtatttatttggtatgggcccatcctcgtcatgatagtttgaccgcacatattgctgatgcgatccatcagcgggcaatggagcggaaaatacaggtgacggaactcgatttatatcggcgtaatttcaacccagtgatgacgccggaagatgaaccagactggaagaatatggataaacgttattctccagaggttcatcagctttatagtgagctgcttgaacatgacacgttagtggtggtttttcctctctggtggtacagcttcccggcaatgctaaaaggatatattgacagagtatggaataatgggctggcttatggagatgggcacaaattaccattcaataaagttcgttgggtggcgctggttggaggagacaaagaaagttttgtccagatgggctgggaaaaaaatataagcgattatttaaaaaatatgtgcagttatcttggtattgaagatgccgatgtcactttcttgtgtaatacagtggtattcgatggggaagaacttcacgcgagctattatcagagcttattatctcaggtacgggatatggtagatgcactataagatgtgttaaaaacgctgtagcagaatgaagcgcggaataaaaaagcggcaactcaataaagttgccgctttacggggaaattagaacattaccttatgaccgtactgctcaagaatgcctttcacgcgttccatggtctctttcttcggtggtttaacaccgtcgagtttgtactcttcacccattgccacccatttgtgtttgcccagctcgtggtaggggagaagctcgattttctcaacgttgcccatatcacgggtaaattcaccgaggcgatgcgcactatcgtcatcgtcagaccagcctgggacaacaacgtagcggatccacaccttcacatttttgttcgccagatatttagcgaactccagcgtgcggtggttggaaactccaaccagattttggtggatctcgtcgttcatctgtttgagatcgagcattaccaggtcggttacttccagcagttcatcaatcaccggatcgtaacgacgaacaaaaccgttggtgtccagacaggtatgaatgccttcttttttgcaggcgcggaaccagtcacgaacaaactcagcttgcaggattgcttcaccgccggatgcggtaacgccgccgccggaagcgttcataaagtggcgataggtcaccacttccttcatcaaatcttcaacggtaacttctttaccgccatgcgtgtcccaggtgtcgcggttatgacaatacaggcagcgcatcaggcagccctggaaaaaggtgataaagcgaatacctgggccgtctacggttccacaggattcaaaggagtgaatgcgaccaataacactcattgcggtgtttctccagatgtggcccatctgaggccgtgttggtgcgcagctcgaaggctacgtcgagtctgttttggcagtcaccttaaagtatagatagctgacaaaaaaggctctcgcgctaaaaaaggccccactttcgtggagcctttattgtacgctttttactgtacgatttcagtcaaatctaattacatagattgagtgaaggtacgagtaataacgtcctgctgctgttctttagtcaggctgttgaaacgtactgcgtagccagatacacggatggtcagctgcggatatttttccgggttttccatcgcgtcgagcagcatttcacggttcatcacgttaacgttcaggtgctgaccaccttcgatggatgcttcgtggtggaagtaaccatccatcagaccagccaggttggtcttacgaacttcgtcgtctttacccagtgcgttcggaacgatagagaaggtgtaggagataccatctttagcgtaagcaaacggcagtttagcaacggaagtcagagaggctactgcacctttctggtcacgaccgtgcatcgggttagcacccggtccgaacggcgcgccagcacgacgaccgtctggggtgttacccgttttcttaccatacacaacgttagaagtgatggtcagaacagactgagtcgggatagcgtcacggtaggtgtgcagtttctgaattttcttcatgaaacgttctaccaggtcaacagccaggtcatctacacgcggatcattgttaccaaactgcgggtattcgccttcgatttcgaagtcgatagccagaccgtcttcgtcacgaatcggtttaactttcgcatatttgattgcagacagggagtcagcagcaacggacagaccagcgataccacacgccatggtgcggataacgtcacggtcgtgcagcgccatcagagaggcttcgtagctgtacttgtcgtgcatgtagtggatgatgttcagtgcagtgatgtactgtttagccagccagtccatgaagtgatccatgcgctccatcacttcatcatagttcaggacatcgcctttgatcggttcagacttcggaccaacctgcattttcagtttttcgtcaacgccgccgttgattgcgtacagcatggttttcgccaggtttgcacgcgcaccgaagaactgcatttgtttaccaacgatcatcgggcttacgcagcaagcaatagcgtagtcatcgttgttgaagtccggacgcatcaggtcatcgttctcatactgcagagaagaggtgtcgatggacactttagcggcgaatttcttgaagttcagcggcagtttttcagaccacagaatggtcatgttcggttccggagacggacccatggtgtacagggtgttcaggaaacggaagctgtttttggtaaccagggtacgaccgtcgaggcccataccaccgatagattcggttgcccagatcgggtcgccagagaacagttcatcgtattccggagtacgcaggaagcgaaccatacgcagtttcatgaccaggtggtcaaccatttcctgcgcttcttgttcggtgatcttgccagctttcaggtcacgttcgatgtacacatccaggaaggtggaggtacgaccgaaggacattgcagcaccgttctgagacttaacagcagccaggtagccgaagtaagtccactggatagcttcctgagcgttggtagccggaccagagatgtcgtagccgtatttcgcagccatttctttcatctgacccagagcgcggtgctgttcagcgatttcttcgcgcagacggatagtctgttccaggtttacgccgttttccagatcagcctgcagagaagtgaactgtgccagtttgtctttcatcaggtagtcgataccgtacagcgcaacgcgacggtagtcaccgatgatacggccacggccatatgcatctggcagaccggtcagaacaccagatttacggcaacgcaggatgtccggagtgtaaacgtcgaacacgccctggttgtgagttttacggtattcagtgaagatttttttgatcatcggatccagttcgcggttgtacgctttgcaggaaccttcgatcattttgataccaccgaacgggataagagcacgtttcagcggagcttcagtctgcagaccaacgattttctcaagctgcttgttgatgtagccagcgtcgtgagaggtgatggtggaagcaacagcggtgtcaaagtcaactggcgcgtgagtgcggttttccagtttaacgccttccattactttgtcccacagggtggtggtcgcttcagtagcgccagccaggaaggactcgtcaccctcgtacggagtgtagtttttctgaatgaagtcacggacgtttacttcattctgccagtcacctttggtaaaaccttcccaggctgtggctaacttttcattaagctcggacatgtaacacctaccttcttaagtggattttttatttactgcgtacttcgacaaccattaatggtggtcgttttcacgcaggtaaatgacccagtatgtcaacccaaccaacaaaccaccaccgataatgttgccgatcgtaaccggaatcaggttatcagtgatgaaattcatcacggtcaggtgagaaaaattttccggtgcagaaccgactgcggtccaaaattccggggatgcgaagtcgcggattacaatacccatcgggatcataaacatgtttgcgatactgtgctcaaaaccgctggcaacaaacatcgcgaccggcagcaccataatgaacgctttgtccatcaggctgcggccagaataactcatccatactgccagacataccatcaggtttgccaggataccaagacagacggcctcaataaaagtatggtgcactttgtggtcggcggtttgtaggacgtttagtccccattgaccatttgcggtcatatactcgccggaaagccacattaaaagtacaaacagcagtgcgccgaccaggttgccaaaatagacatttagccagtttttcgccaactgaccccaggtgatgcgcccactcgccttagcaacaacaatcaacacggtggaagtaaagagatcggctccgcagacaacacaaagaatcagccccagagagaagcaaatgccgccaaccagttttgccatgccgaagggcattgtgcctgtgccagtggttgctgtgatatagaagacgaatgcgatactgatgaaaacaccggcggtaatcgccagatagaaagtcttaagcggatgtttcgttgctttatagacacccgcctcttcggccactttggccattgcagcaggaagtaaaagatcaaaagggttgtcagctttcacactaactctctctttattaagtcggcgacgagatactaacaaagcattatagatgagaaattgatatagatcatatctcgcctggcttataggcccgtaactcgcatggtttttatgcaaatacggagtaaatatttgattatccaaataaaaataaattttaaaaattaacaaatgagttgaattttttccgcatcctccgctaaaacagttaattaaaagggagcatcaggcgaataaagtaacaatatcgatcgtatttattaaatacaaattaccgatatttaaccttataattacaattattttattaatgcaaatatatgtaaagcggggcattaaaaaaacgccccgtaatataactcagactaatcattaagcctacattgcgtaggctatttgattttattttgcccagaatgctgctttggcgcgctgcagcttttcgtaggccttcaacaagctctgatgtgcagcaaacgcgtgcagatcgctatctaccggttgcaggccgtaaaacgccgcttcgccgctcattgccgcactggcggcttctacggcatctgcgccgtacatgcgaacaaacgcattcagatattgcagcggctggcgatcttcttcctgtgccagtaataacaacgtttgcaggcagcgataatagttggcgcgttccggactaaatacactactgttaaactccatcgtccattcggtccagaccagagcctgttccagatcgccaccagccagcgccagcatggcttttaattcaccgatacgcagggtgtaccaaccgttatcgctcccggtcgccagacccaacagctcacgcacgcgggtaaagtcatcaaaaccttcttcatccagttgctcgatgaggttcaggtaatcttctttttcccactcgctgcctggtaggctaagaatcgtttcacgtaaatggctgcccatactgttattcgcgagccacagatcttcagccggataaatatcggacatgccaggcacgataatacggcaagcataaacgcccagatgctcgtaatcggcaatataaacttctttatcttctttgttgaagatagccatcagtgtggcgaactcttcttccgtggtgccggagaaattccagtccacaaacggataatcggcatcctgcttgaacaggtcccaggagattaaaccgctggaatcgataaagtgcgtttcgaggttggtatgttcagcgacttcttcatcatcgaaggttggcggagtaaacacatccaaatctttcaggccacgaccttgcagcagctcggtcacggtacgttccagtgctacgccaaaatcaggatgcgcaccgaaagaggcaaagcaggtaccgttagcaggattgaacagtaccacgcaaatcaccggatactggccgccaaggctaccgtcataagcgaagattgggaaaccctccgcttccagcgtttcgatggcttcaactactgctgggtaacgcgccagcacgtctgccgggatctctggcaggctgatgctttcagcaataatgcggtttttcacgtagcgttcgaaaacttcagacaatccctgaacgcgtgcttcgttgcgggtattacctgcggacataccgttggagacgtacaggttaccaatgatattcatcggaatataaacggtctgattgtcggactgacgcgtaaacggcaggccgcaaataccacgatcttcgttaccggattgtaggtcaatcagcatgctgccggtcagttcattctccggatcataaaacgcgcgcagacggtcatcgagcagcccttctggcacatcgtcattttcggtcagtgggaaccatttttcgttgggataatgcacgaacggaccgttggcgatggtttcgcccagccagaagtccgcaaaaaagtagttggtactgagacgctcgaaatattcaccgagtgcagaagccagcgccgctttcttggttgcgcctttaccgttggtaaaacacagtgcgcactctttgtcgcgaatatgtacagaccagacgttaggcacgggattcagccaggaggcctcttcaatctgaaagccgaggtcactaagtttttgctggaagcgagcgatggaatcttccagagcggcatctttgccggggataaatgtttgcgtcatgaaaatcactttagtcgtacggaaagcgcgcaataatacgggttttatctcaaaggcgctatcaccgccgccatgccgatgaactgttgactatgcttttagcggataaaccacgttaagagcataaaaatgaaggcgttcgatctccaccgtatggcatttgataaagtgccttttgatttccttggcgaagttgcactacgtagtctttatacctttgtactggtctttttgttcctcaaaatgaccggaagacgcggtgtgcggcagatgagcctgtttgaagttttaatcattctgacgctgggaagtgcggcgggagatgtggcgttttatgatgatgtgccgatggtcccggtacttatcgtctttattactctggcgttgttataccgcctggtaatgtggttgatggcgcacagtgaaaaactggaagatcttctggaaggcaagccagttgtcattattgaagatggcgagctggcctggagcaaactcaataactccaacatgacggaatttgagttctttatggagctacgattgcgtggcgtggagcagctggggcaggtacgtctggcgattctcgaaaccaacgggcaaatcagtgtctatttctttgaagatgacaaggtgaaaccgggtttacttattttacccagtgattgtacgcagcgttacaaagtggtgccggagagcgcggactatgcctgtattcgttgtagtgaaatcattcatatgaaagcgggggaaaaacaattatgtccgcgctgtgcaaatccagaatggacgaaggcaagtcgggcaaaacgggtgacctgacagtaaaaacatcggctttttgctaataatccgagagattcttttgtgtgatgcaagccacatttttgccctcaacggttttactcattgcgatgtgtgtcactgaatgataaaaccgatagccacaggaataatgtattacctgtggtcgcaatcgattgaccgcgggttaatagcaacgcaacgtggtgaggggaaatggctcaaatcttcaattttagttctggtccggcaatgctaccggcagaggtgcttaaacaggctcaacaggaactgcgcgactggaacggtcttggtacgagcgtgatggaagtgagtcaccgtggcaaagagttcattcaggttgcagaggaagccgagaaggattttcgcgatcttcttaatgtcccctccaactacaaggtattattctgccatggcggtggtcgcggtcagtttgctgcggtaccgctgaatattctcggtgataaaaccaccgcagattatgttgatgccggttactgggcggcaagtgccattaaagaagcgaaaaaatactgcacgcctaatgtctttgacgccaaagtgactgttgatggtctgcgcgcggttaagccaatgcgtgaatggcaactctctgataatgctgcttatatgcattattgcccgaatgaaaccatcgatggtatcgccatcgacgaaacgccagacttcggcgcagatgtggtggtcgccgctgacttctctagtaccattctttcccgtccgattgacgtcagccgttatggtgtaatttacgctggcgcgcagaaaaatatcggcccggctggcctgacaatcgtcatcgttcgtgaagatttgctgggcaaagcgaatatcgcgtgtccgagcattctggattattccatcctcaacgataacggctccatgtttaacacgccgccgacatttgcctggtatctatctggtctggtctttaaatggctgaaagcgaacggcggtgtagctgaaatggataaaatcaatcagcaaaaagcagaactgctatatggggtgattgataacagcgatttctaccgcaatgacgtggcgaaagctaaccgtagccggatgaacgtgccgttccagttggcggacagtgcgcttgacaaattgttccttgaagagtcttttgctgctggccttcatgcactgaaaggtcaccgtgtggtcggcggaatgcgcgcttctatttataacgccatgccgctggaaggcgttaaagcgctgacagacttcatggttgagttcgaacgccgtcacggttaatgccgaaattttgcttaatccccacagccagcctgtggggtttttatttctgttgtagagagttgagttcatggaatccctgacgttacaacccatcgctcgtgtcgatggcactattaatctgcccggttccaagagcgtttctaaccgcgctttattgctggcggcattagcacacggcaaaacagtattaaccaatctgctggatagcgatgacgtgcgccatatgctgaatgcattaacagcgttaggggtaagctatacgcttagtgccgatcgtacgcgttgcgaaattatcggtaacggcggtccattacacgcagaaggtgccctggagttgttcctcggtaacgccggaacggcaatgcgtccgctggcggcagctctttgtctgggtagcaatgatattgtgctgaccggtgagccgcgtatgaaagaacgcccgattggtcatctggtggatgcgctgcgcctgggcggggcgaagatcacttacctggaacaagaaaattatccgccgttgcgtttacagggcggctttactggcggcaacgttgacgttgatggctccgtttccagccaattcctcaccgcactgttaatgactgcgcctcttgcgccggaagatacggtgattcgtattaaaggcgatctggtttctaaaccttatatcgacatcacactcaatctgatgaagacgtttggtgttgaaattgaaaatcagcactatcaacaatttgtcgtaaaaggcgggcagtcttatcagtctccgggtacttatttggtcgaaggcgatgcatctagcgcttcttactttctggcagcagcagcaatcaaaggcggcactgtaaaagtgaccggtattggacgtaacagtatgcagggtgatattcgctttgctgatgtgctggaaaaaatgggcgcgaccatttgctggggcgatgattatatttcctgcacgcgtggtgaactgaacgctattgatatggatatgaaccatattcctgatgcggcgatgaccattgccacggcggcgttatttgcaaaaggcaccaccacgctgcgcaatatctataactggcgtgttaaagagaccgatcgcctgtttgcgatggcaacagaactgcgtaaagtcggcgcggaagtggaagaggggcacgattacattcgtatcactcctccggaaaaactgaactttgccgagatcgcgacatacaatgatcaccggatggcgatgtgtttcagcctggtggcgttgagtgatacaccagtgacgattcttgatcccaaatgcacggccaaaacatttccggattatttcgagcagctggcgcggattagccaggcagcctgaatgaacaacgggcaataaatagccaaatctttctttatcaaaacgtcggcacattgtcggcgttttttttcggaccttgtgagtcattttgattaatggtagcgtcgcttgtcaatgtaagttgttgatacataatatttatatatgattaatcaacggatgattcacatgaagaatactaaattactgctggcgattgcgacctctgcagcattactgacagggtgtcaaaatacccacggtattgataccaatatggctatcagctccggtttaaatgcctataaagcagcaacattaagcgatgccgatgcaaaagcgattgccaatcagggctgtgccgaaatggacagcggcaatcaagtcgcaagtaaatccagcaagtacggtaaacgtctggcaaaaatcgccaaagcattgggtaacaatattaatggcacgccggtcaactataaggtttatatgaccagcgacgtcaacgcatgggcgatggcgaacggctgtgttcgtgtctacagtggcctgatggacatgatgaatgacaacgaaattgaaggcgttctgggccatgaactgggccacgtcgcgttgggtcacagcctggctgaaatgaaagcttcttatgcgatcgttgccgcacgcgatgccattagtgctaccagcggtgtggcttcccagctttcccgcagtcaattaggtgatatcgcagaaggcgctatcaatgctaaatactcccgtgataaagagtccgaagcagatgatttctcctttgatctgttgaagaaacgtggcatcagcacccaggggctggttggcagctttgaaacactggctagcctggatggcggtcgcacccagtccatgtttgactctcacccaccaagtacagagcgtgcgcaacacatccgtgatcgtatcgcctctggtaagtaaatcattgtcatctttcgggctggtcttctgccagcccgctataattgcgcaataaatccccatctgaatacagacaaaactggtttttgcacacaacgttaacgatttgtggcgtcggcgcgtataatgcgcgcggttatgttaacggtacgcctgttttaaggagataaagatgacggcaattgccccggttattaccattgatggcccaagcggtgcagggaaaggcaccttgtgtaaggctatggcggaagcgttgcaatggcatctgctggacagcggtgcaatttatcgcgtactggcattggcggcattacatcaccatgttgatgttgcgagcgaagatgcgctggtaccgctggcatcccatctggatgtacgttttgtgagcaccaatggcaatctggaagtgatcctcgaaggggaagatgtcagcggcgaaattcgtactcaggaagtggcgaatgcagctagtcaagtcgcggcattcccacgcgttcgtgaagcattattgcgtcgccaacgcgcgtttcgcgaattaccaggtctgattgccgatggccgcgacatgggaacggtggtattccctgatgcaccagtgaaaattttccttgacgcctccagcgaagaacgtgcgcatcgccgcatgctacagttgcaggagaagggctttagtgttaactttgagcgccttttggccgagatcaaagaacgcgacgaccgcgatcgtaaccgagcggtagcgccactggttccggcagccgatgctttagtgttggattccaccaccttaagcattgagcaagtgattgaaaaagcgctacaatacgcgcgccagaaattggctctcgcataagcgaccgaatttgcagtacccccgttgcaatggaatgacagcgggtatgttaaacaaccccatccggcatggagccaggtggacgttaaatataaacctgaagattaaacatgactgaatcttttgctcaactctttgaagagtccttaaaagaaatcgaaacccgcccgggttctatcgttcgtggcgttgttgttgctatcgacaaagacgtagtactggttgacgctggtctgaaatctgagtccgccatcccggctgagcagttcaaaaacgcccagggcgagctggaaatccaggtaggtgacgaagttgacgttgctctggacgcagtagaagacggcttcggtgaaactctgctgtcccgtgagaaagctaaacgtcacgaagcctggatcacgctggaaaaagcttacgaagatgctgaaactgttaccggtgttatcaacggcaaagttaagggcggcttcactgttgagctgaacggtattcgtgcgttcctgccaggttctctggtagacgttcgtccggtgcgtgacactctgcacctggaaggcaaagagcttgaatttaaagtaatcaagctggatcagaagcgcaacaacgttgttgtttctcgtcgtgccgttatcgaatccgaaaacagcgcagagcgcgatcagctgctggaaaacctgcaggaaggcatggaagttaaaggtatcgttaagaacctcactgactacggtgcattcgttgatctgggcggcgttgacggcctgctgcacatcactgacatggcctggaaacgcgttaagcatccgagcgaaatcgtcaacgtgggcgacgaaatcactgttaaagtgctgaagttcgaccgcgaacgtacccgtgtatccctgggcctgaaacagctgggcgaagatccgtgggtagctatcgctaaacgttatccggaaggtaccaaactgactggtcgcgtgaccaacctgaccgactacggctgcttcgttgaaatcgaagaaggcgttgaaggcctggtacacgtttccgaaatggactggaccaacaaaaacatccacccgtccaaagttgttaacgttggcgatgtagtggaagttatggttctggatatcgacgaagaacgtcgtcgtatctccctgggtctgaaacagtgcaaagctaacccgtggcagcagttcgcggaaacccacaacaagggcgaccgtgttgaaggtaaaatcaagtctatcactgacttcggtatcttcatcggcttggacggcggcatcgacggcctggttcacctgtctgacatctcctggaacgttgcaggcgaagaagcagttcgtgaatacaaaaaaggcgacgaaatcgctgcagttgttctgcaggttgacgcagaacgtgaacgtatctccctgggcgttaaacagctcgcagaagatccgttcaacaactgggttgctctgaacaagaaaggcgctatcgtaaccggtaaagtaactgcagttgacgctaaaggcgcaaccgtagaactggctgacggcgttgaaggttacctgcgtgcttctgaagcatcccgtgaccgcgttgaagacgctaccctggttctgagcgttggcgacgaagttgaagctaaattcaccggcgttgatcgtaaaaaccgcgcaatcagcctgtctgttcgtgcgaaagacgaagctgacgagaaagatgcaatcgcaactgttaacaaacaggaagatgcaaacttctccaacaacgcaatggctgaagctttcaaagcagctaaaggcgagtaattctctgactcttcgggatttttattccgaagtttgttgagtttacttgacagattgcaggtttcgtcctgtaatcaagcactaagggcggctacggccgcccttaatcaatgcagcaacagcagccgcttaatttgcctttaaggaaccggaggaatcatgaccaagagtgaattgatagaaagacttgccacccagcaaagccacattcccgccaagacggttgaagatgcagtaaaagagatgctggagcatatggccagcactcttgcgcagggcgagcgtattgaaatccgcggtttcggcagtttctctttgcactaccgcgcaccacgtaccggacgtaatccgaagactggcgataaagtagaactggaaggaaaatacgttcctcactttaaacttggtaaagaactgcgcgatcgcgccaatatttacggttaagttttttactcaaacttgaacgagagaaaagcacctgtcgggtgcttttttcatttctctaatctggaactggaagctgcctcgcagagttttgaacagttttcaccctttcgttaaattcttctgaatatgcctcggggaacgcaaaattcccaccagacaaccgctcaacaaagttgcacactttccataaacagggaggggtgcatgaaaataacgacagtcggtgtatgcataattagcggaatttttccgttgctgattttgccccaattgcctgggacattaacccttgcgtttctgactctcttcgcctgcgtactggcatttatccctgttaaaaccgtccgttatatcgcgctgacgttgctgtttttcgtttggggcatattaagtgcaaagcaaattttgtgggcaggagaaaccttaactggcgcgacgcaggatgcaattgttgagatcactgcaactgacggcatgaccactcattacggtcaaattactcatctacaaggtcgacgtatattccctgcgagtggtctcgtgatgtatggcgaatatcttccgcaagcggtttgtgctggacaacaatggagtatgaaactcaaagttcgtgcagttcatggccaacttaatgatggcggctttgatagccagcgttatgccattgcccagcatcagccgctcaccggccgttttctgcaggcaagtgtcattgaaccgaattgtagcctgcgtgcacagtatctggcgagtctacaaacaacgctgcaaccctatccgtggaatgcggttattcttggtttaggtatgggggaacggttatccgtccccaaagaaatcaaaaatatcatgcgcgatactggaacggcgcatttaatggcgataagcggattgcacatcgcttttgcggcgttgctggctgccggactcattcgcagtggacaaatttttctgcctgggcgctggatccactggcaaataccattaattggcggaatctgctgtgctgctttttatgcctggttgacgggaatgcaacctcctgcattgcgtaccatggtggcgcttgctacgtggggaatgcttaagttaagtgggcgacagtggagtggctgggatgtatggatatgttgtctggcggcaattttgctgatggatcctgttgccattctcagccaaagtttatggctctctgccgctgcggtcgcggcattgatattttggtatcagtggcttccctgtcctgagtggcaactgccgccggtattgcgtgcagttgtttccctcatccatctgcaactgggaatcacacttctgcttatgcccgtgcaaatcgtcatatttcatggcattagtctgaccagctttattgcaaatctattagcaattcccttggtgacatttatcacggttccgttgatcctcgccgcgatggttgtgcatttaagcgggccgttaatcctggagcaagggttatggtttcttgccgaccggtctttggctttacttttctgggggttaaagagtttgccggaagggtggatcaacattgctgaatgttggcaatggctaagtttttccccatggttcttactggtggtatggcgattaaacgcctggcgaacgttgccagcaatgtgtgtggctggaggcttgctgatgtgctggccgctgtggcaaaaacctcgacctgacgagtggcagctgtacatgcttgatgtcgggcaagggctggcaatggtgatagccagaaacggcaaagcgattctctatgacacaggactggcctggcctgaaggggatagtgggcaacaactgattatcccctggctccactggcataatcttgaaccggaaggcgttattctgagccatgaacatctggatcaccggggagggctggatagtatattgcatatatggccgatgttatggatcagaagtccgttaaactgggaacatcatcagccctgtgtgcgtggcgaagcgtggcaatggcaaggattgcgtttcagcgcgcactggcctttacaaggtagcaacgataaaggaaataaccattcctgtgtggttaaggttgatgacgggacgaatagcattcttctaaccggtgatattgaagccccagctgaacaaaagatgctaagccgttactggcagcaagtgcaggcaacattgcttcaggtacctcaccatggcagtaataccagtagtagcttgccattaattcagcgagtgaatggaaaagtggcactcgcaagcgcaagccgctataacgcatggcgactgccctctaacaaagttaagcatcgctatcaactgcaaggatatcaatggattgatactccacatcaaggtcaaacaacggtcaattttagtgcgcaaggctggcggattagcagcctcagggagcaaattttacctcgttggtatcatcagtggtttggcgtgccagtggataacgggtaaaatatgcggctatttcaacaaatgctggttttttgaatgcataacgacaaagatctctctacgtggcagacattccgccgactgtggccaaccattgcgcctttcaaagcgggtctgatcgtggcgggcgtagcgttaatcctcaacgcagccagcgataccttcatgttaagcctccttaagccacttcttgatgatggctttggtaaaacagatcgctccgtgctggtgtggatgccgctggtggtgatcgggctgatgattttacgtggtatcaccagctatgtctccagctactgtatctcctgggtaagtggaaaggtggtaatgaccatgcgtcgccgcctgtttggtcacatgatgggaatgccagttagtttctttgacaaacagagtacgggtacgctgttgagtcgtattacctacgattccgaacaggttgcttcttcttcttccggcgcactgattactgttgtgcgtgaaggtgcgagcatcatcggcctgttcatcatgatgttctattacagttggcaactgagcatcattttgattgtgctggcaccgattgttagcattgcgattcgcgttgtaagcaagcgttttcgcaacatcagtaaaaacatgcagaacaccatggggcaggtgaccaccagcgcagaacaaatgctgaagggccacaaagaagtattgattttcggtggtcaggaagtggaaacgaaacgctttgataaagtcagcaaccgaatgcgtcttcaggggatgaaaatggttagtgcctcttccatctctgatccgatcattcagctgatcgcctctttggcgctggcgtttgttctgtatgcggcgagcttcccaagtgtcatggatagcctgactgccggtacgattaccgttgttttctctagtatgattgcactgatgcgtccgctgaaaagcctgaccaacgttaacgcccagttccagcgcggtatggcggcttgtcagacgctgtttaccattctggacagtgagcaggagaaagatgaaggtaagcgcgtgatcgagcgtgcgactggcgacgtggaattccgcaatgtcacctttacttatccgggacgtgacgtacctgcattgcgtaacatcaacctgaaaattccggcagggaagacggttgctctggttggacgctctggtagcggtaaaagtaccatcgccagcctgatcacgcgtttttacgatattgatgaaggcgaaatcctgatggatggtcacgatctgcgcgagtataccctggcgagcttacgtaaccaggttgctctggtgagccagaatgtccatctgtttaacgatacggttgctaacaacattgcttacgcacggactgaacagtacagccgtgagcaaattgaagaagcggcgcgtatggcctacgccatggacttcatcaataagatggataacggtctcgatacagtgattggtgaaaacggcgtgctgctctctggcggtcagcgtcagcgtattgctatcgctcgagccttgttgcgtgatagcccgattctgattctggacgaagctaccagcgctctggataccgaatccgaacgtgcgattcaggcggcactggatgagttgcagaaaaaccgtacctctctggtgattgcccaccgcttgtctaccattgaaaaggcagacgaaatcgtggtcgtcgaggatggtgtcattgtggaacgcggtacgcataacgatttgcttgagcaccgcggcgtttacgcgcaacttcacaaaatgcagtttggccaatgatcgaaaaaatctggtctggtgaatcccctttgtggcggctattgctgccactctcctggttgtatggcctggtgagtggcgcgatccgtctttgctataaactaaaactgaagcgcgcctggcgtgcccccgtaccggttgtcgtggttggtaatctcaccgcaggcggcaacggaaaaaccccggtcgttgtctggctggtggaacagttgcaacagcgcggtattcgcgtgggggtcgtaagccggggatatggtggtaaggctgaatcttatccgctgttattgagcgcagataccacaacagcacaggcgggtgatgaacctgtgttgatttatcaacgcactgatgcgcctgttgcggtttctcccgttcgttctgatgcggtaaaagccattctggcgcaacaccctgatgtgcagatcatcgtaaccgacgacggtttacagcattaccgtctggcgcgtgatgtggaaattgtcgttattgatggtgtgcgtcgctttggcaatggctggtggttgccggcggggccaatgcgtgagcgagcggggcgcttaaagagcgttgatgcggtaatcgtcaacggcggtgtccctcgcagcggtgaaatccccatgcatctgctgccgggtcaggcggtgaatttacgtaccggtacgcgttgtgacgttgctcagcttgaacatgtagtggcgatggcggggattgggcatccgccgcgcttttttgccacgctgaagatgtgtggcgtacaaccggaaaaatgtgtaccgctggccgatcatcagtctttgaaccatgcggatgtcagtgcgttggtaagcgccgggcaaacgctggtaatgactgaaaaagatgcggtgaaatgccgggcctttgcagaagaaaattggtggtatttgcctgtagacgcacagcttagtggtgatgaaccagcgaaactgcttacgcaactaaccttgctggcttctggcaactaattacgccgcggcagcgttcgattgatggagtcatgaatgagcctgccgcacctctcccttgctgatgcgcgtaatcttcaccttgccgcacaaggcctgttaaacaaaccccgccgtcgagcgagcttggaggatattccggcaacgatctcccgcatgtccttgctgcaaatcgataccatcaatattgttgcccgtagtccatatctggtgcttttcagtcgtctgggaaattatcctgcccagtggctggatgagtctctggcgcgtggcgaattaatggaatactgggcgcatgaagcctgctttatgccgcgtagcgactttcgtcttattcgccaccgcatgctggcacctgaaaaaatgggctggaaatacaaagacgcctggatgcaggaacatgaggcggaaattgcacagttaattcagcatattcatgataaggggccggtacgtagtgccgattttgagcatcctcgtaaaggtgcaagcggctggtgggaatggaagccgcataaacggcatctggaaggtttatttactgccggaaaggtgatggtgattgaacggcgcaacttccagcgcgtttatgatttaacccaccgtgtcatgcctgactgggatgatgagcgcgatctcgttagccaaacagaagcagaaatcatcatgctggataacagtgcgcgtagcctgggaatattccgcgaacagtggctggcagattactatcggctgaaacgtccggcactggcggcgtggcgcgaagcgagggctgaacagcagcaaatcattgctgtgcatgttgaaaaattgggcaatctttggctgcatgatgatttgctgccgctactcgagcgagcgctggccggaaagctcactgcaacgcacagcgcggtacttagcccttttgatcctgttgtctgggatcgcaaacgcgcagagcagctttttgattttagctaccggctggagtgctataccccagcgccgaaacgccagtatggctattttgttctgccgttattacatcgtgggcaattagttgggcgaatggatgccaaaatgcatcgccagacaggcatccttgaagttatctctctgtggttacaggaaggtattaaaccaacgacaacgctgcaaaaagggctacgtcaggcgattactgatttcgctaactggcagcaggcaacgcgggtgacattaggatgctgcccgcaaggcctctttactgattgccgcaccggctgggaaatagaccccgtcgcataaatgattatgataagatttatgcattcataacccgatccatctggaggaactatggatcatcgtctgcttgaaatcattgcctgcccggtttgcaacggaaaactttggtataaccaggaaaaacaagagcttatttgcaaactggacaacctcgctttcccgctgcgtgatggcattccagtgttgctggaaacggaagcccgcgtgctgactgctgatgagagtaaaagttgatgtaaactgctgatgagagtaaatcatgagttttgtggtcattattcccgcgcgctacgcgtccacgcgtctgcccggtaaaccattggttgatattaacggcaaacccatgattgttcatgttcttgaacgcgcgcgtgaaagtggtgccgagcgcatcatcgtggcaaccgatcatgaggatgttgcccgcgccgttgaagccgctggcggtgaagtatgtatgacgcgcgccgatcatcagagtggaacagaacgtctggcggaagttgtcgaaaaatgcgcattcagcgacgacacggtgatcgttaatgtgcagggtgatgaaccgatgatccctgcgacaatcattcgtcaggttgctgataacctcgctcagcgtcaggtgggtatggcgactctggcggtgccaatccacaatgcggaagaagcgtttaacccgaatgcggtgaaagtggttctcgacgctgaagggtatgcactgtacttctctcgcgccaccattccttgggatcgtgatcgttttgcagaaggccttgaaaccgttggcgataacttcctgcgtcatcttggtatttatggctaccgtgcaggctttatccgtcgttacgtcaactggcagccaagtccgttagaacacatcgaaatgttagagcagcttcgtgttctgtggtacggcgaaaaaatccatgttgctgttgctcaggaagttcctggcacaggtgtggatacccctgaagatcttgagcgcgttcgcgctgaaatgcgctaatttcacttcacgacacttcagccaattttgggaggagtgtcgtaccgttacgattttcctcaatttttcttttcaacaattgatctcattcaggtgacatcttttatattggcgctcattatgaaagcagtagcttttatgagggtaatctgaatggaacagctgcgtgccgaattaagccatttactgggcgaaaaactcagtcgtattgagtgcgtcaatgaaaaagcggatacggcgttgtgggctttgtatgacagccagggaaacccaatgccgttaatggcaagaagctttagtacgcccggaaaagcccgacaactggcatggaaaaccaccatgctggcaagaagtgggactgtccgtatgccgactatttatggtgtgatgacgcatgaagaacaccccggccccgatgtcctgctactggagcggatgcgtggtgttagcgtggaggcaccagcccgaacaccagaacgctgggaacaactcaaagaccaaatcgttgaagccttactggcctggcaccgtcaggacagtcgcggttgcgtcggcgcggtcgacaatactcaggaaaatttctggcccagttggtaccggcaacatgttgaagtgctatggaccacgctcaatcagttcaataacaccggtctgacgatgcaggataagcggatcctgtttcgcactcgcgaatgtctcccggcattatttgaaggctttaacgacaattgtgtgctgattcacggtaacttctgtttacgcagcatgttgaaagatagccgcagcgatcagttactggcgatggtcgggccgggactaatgctttgggcaccgcgagaatacgaactgttccgactaatggataattctctggcggaagatttgctctggagttacctgcaacgcgcgccagtggcggagagcttcatctggcggcgttggttgtatgtgttatgggatgaagttgcgcaactggttaataccggacgatttagtcggcgcaacttcgatctggcaagtaaaagtctcttgccgtggctcgcctgatcactcttgccgtggctcgccactgctaccttttagccactgccagatacggccaagcgtttcatagccaacacgatcgctatgcatcaaccagaccggagaagggattgcccgttcccacgggttaagcgggctgtcgatggccaactgattcgccggggctggtagcggatttaacccttcctgctgaaaaaagatcatcgcccgcggcagatgacttgcggaggtcaccagcaggaaaggggcgtcaccaatcgcctgtttcactgctgcagcttcttcttcggtatcttttggcaaatccagggtgataatttgctcgcgcggcacgcccaggctttgcgcaactctggcacctacttccgctgtactcaccgtattggtttttgctacgcctcccgtgaagatcagtttacttcccggattttcgcgccataagcgaataccttcattcaggcgtggcagactgttattgattaaattagagctcggtgcccactgcgggttccaggtataaccacctccgagcaccacgatatagtccactttttggctattattccatgtcggataggtgctttcgatgggacgcagcaggcggtcggctaccggttgcaaactcaataacaagagcgccagccacccaatgctaataaaaatcttcccggttttttgaaaacggctaaaccacagcagcgccaggccagcgccaataatcaacaacatcagcggaagtggcagcaacatattgccaatcacttttttcagtgtaaaaagcatcctttctggttccttttttaaccatatagcaagggatcgccagcgatattacaccagacgggttcattctcgccgtggctgtgacaaaatagcgtctttatcagaaaacgtcttagccaaccggtggagaaagcaatgcaggatcgcaattttgatgatattgcggaaaagttttcccgtaacatttacggcaccaccaaagggcagcttcgacaggctattctgtggcaggatctcgatcgcgtgctggcggaaatgggcccgcaaaaactgcgtgtgctggatgctggcggtggagaagggcagaccgcaatcaaaatggccgagcgtgggcatcaggtcattttatgcgatctttctgcgcagatgatcgaccgcgcaaaacaggcggcagaagcaaaaggtgtgagcgacaacatgcaatttatacattgcgccgctcaggatgttgctagccatttggaaacgcccgttgatctgatattgttccatgcggtgctcgagtgggtggctgatccccgcagcgtattgcagaccctctggagtgtgttgcgtccaggcggcgtgttgagcttaatgttctacaatgcgcatggtttgttgatgcataacatggtcgccgggaattttgattacgtgcaggcgggaatgccgaaaaagaaaaaacggacgcttagcccagattatccacgcgacccggcgcaggtttatctgtggctggaagaagctggttggcaaattatgggtaagacaggcgttcgcgtgtttcatgattatctgcgcgagaaacaccagcagcgcgactgctatgaagcattacttgaattagaaacgcgttattgccgtcaggaaccgtatattaccctggggcgttatattcatgtcaccgcgcgcaaaccgcagagcaaggataaagtatgagtgaattttcccagacagtccccgaactggttgcctgggccagaaaaaatgacttctccatcagcctgccggtagaccgactctcttttctgctggcggttgccacgctgaacggcgagcgtctggatggtgagatgagtgaaggcgagctggtggatgcattccgccatgtgagtgatgcgtttgagcaaaccagcgaaaccatcggcgtgcgcgccaataacgcgatcaacgacatggtgcgtcaacgtctgctgaaccgctttaccagcgagcaggcggaagggaacgcaatttaccgtctgacgccgctcggcatcggcattactgactactacatccgtcagcgcgagttttctacgctgcgtctttctatgcagttgagcattgtggcgggtgagctcaaacgcgcagcagatgccgccgaagagggcggtgatgaatttcactggcaccgtaatgtctatgcgccactgaaatatagcgtagcagaaattttcgacagtatcgacctgacgcaacgtctgatggacgaacagcagcagcaggtgaaggacgatatcgcccagttgctgaacaaagactggcgggcggcgatttccagctgtgaattgttgcttagcgaaacttccggaacgctgcgtgaattgcaggatacgctggaagcggcaggcgacaaattgcaggctaatctgttgcgcattcaggatgcgacgatgacccatgacgatctgcatttcgtcgatcgtctggtgttcgatctgcagagcaaactcgatcgtattatcagttggggccagcaatccatcgacttgtggattggctacgaccgccacgtacacaaatttattcgtaccgcgatcgatatggataaaaaccgcgtctttgctcagcggttacgtcagagcgtacaaacctattttgatgagccgtgggcgctaacttatgccaatgccgatcgtctgctggatatgcgtgacgaagagatggcactgcgcgatgaagaagtgactggggaacttcctgaggatctggaatacgaagagtttaacgagatccgcgaacagctggcggcgatcatcgaagaacaacttgccgtgtacaaaaccagacaagtgccgctggatcttggtctggtggtacgcgaatatctgagtcagtatccgcgtgcacgtcactttgacgttgcgcgtattgttattgatcaggcggtacgtcttggcgtagcgcaagcagatttcaccggactgccagcgaaatggcagccgattaatgattacggagccaaggtacaggcgcatgtcatcgacaaatattgaacaagtgatgccggttaagctggcgcaggcgctggcgaatccgttatttccggcgctggacagcgccttacgtagtggacgccatattggcctcgacgaactggataatcatgcattcctgatggattttcaggaatatctggaagagttttacgcgcgttataacgttgagcttattcgcgcaccagaagggttcttctatttacgcccacgttccaccacgctgatccctcgttccgtcttgagcgaactggatatgatggtcgggaaaatcctctgttatctctatctcagcccggaacggctggcgaatgaggggattttcacccagcaggaactgtacgacgaactgctcaccctggccgatgaagcaaaactgctgaaactggtgaacaaccgtagtaccggtagtgacgttgaccgtcagaagttgcaggagaaagtacgttctagcctcaaccgtctgcgtcgtttaggcatggtgtggtttatgggccacgacagcagcaagtttcgcattaccgaaagcgtgttccgcttcggagccgatgtgcgtgctggcgacgatccccgtgaagcacagcgtcgcctgattcgtgatggcgaagcaatgccgattgaaaatcatctgcaactcaacgatgaaaccgaagagaatcagccagatagcggagaggaagaataatgattgaacgcggtaaatttcgcagtctgacgctgattaactggaacggcttttttgcccgaacttttgaccttgacgagctggtcacgacgctttctggcggtaacggggcgggtaaatccaccaccatggcggcgttcgttacggcgctgatccccgacctgaccctgctgcatttccgtaacactacggaagccggggccaccagcggtagccgcgataaaggtctgcacggtaagctgaaagcgggtgtctgttatagcatgctcgacaccattaacagccgccaccagcgcgtggtggtcggtgtgcgtctgcaacaggttgccggacgcgatcgtaaagtggatatcaagccgtttgccattcagggactgccgatgagcgtgcagccgacacagctggtgaccgaaaccctgaacgaacgccaggcgcgcgtgctgccgcttaacgagctgaaagacaagctcgaggcgatggaaggcgtgcagtttaaacagttcaactccattactgattaccacagcctgatgttcgatctgggcatcatcgcgcgtcgtctgcgctccgcatctgaccgtagcaaattctatcgtctgatcgaagctagcctgtatggcgggatctccagtgccattacccgttctctgcgcgactacctgttgccagaaaacagcggcgtgcgtaaagcgttccaggacatggaagcggcgctgcgtgaaaaccgtatgacgctggaagcgattcgtgtcacccagagcgaccgcgacctgtttaagcatctgatcagcgaagccaccaactacgtggcggcggactacatgcgtcacgccaacgagcgccgtgtccatctcgacaaagccctggagtttcgtcgcgagctacatactagccgtcagcaactggcggctgagcagtacaaacacgtcgatatggcgcgtgagctggcagagcacaacggtgccgaaggcgatctggaagcggattatcaggcggccagtgatcacctgaacctggtgcaaaccgcactgcgtcagcaggagaagatcgaacgctacgaagcggatctcgatgagctgcagatccgtctggaagagcaaaatgaagtggtggcagaagccatcgaacgccagcaagagaatgaggctcgtgcggaagctgccgaactggaagtggacgagctgaaaagccagcttgctgactaccagcaggcgctggacgtccagcaaacgcgcgcgatccagtataaccaggcgattgctgcgcttaatcgtgccaaagaactgtgccatctgccggacttaaccgccgactgcgccgccgaatggctggaaaccttccaggcgaaagagctggaagcgactgaaaaaatgctctctcttgagcagaaaatgagcatggcgcaaaccgcgcacagccagtttgagcaggcttatcagctggtggtggcaatcaacggcccactggcgcgtaacgaggcgtgggatgtcgctcgcgaactattgcgcgaaggggtcgatcagcgtcacctggcagagcaggttcagccgctgcggatgcgattaagcgaactggaacagcgtctacgcgagcagcaagaagctgagcgtctgctggcagatttctgcaaacgtcagggcaagaattttgatatcgacgaactggaagccctgcatcaggaactggaagcacgcattgcctctctttccgatagcgtgtctaacgcccgtgaagagcgcatggcactgcgccaggagcaggaacagctgcagtctcgcattcagagtttgatgcagcgtgcgccggtttggctggcagcgcaaaacagtctcaaccagttgagcgaacagtgcggcgaagagtttacctccagccaggacgtcaccgaatatctgcaacagttgctggagcgtgagcgagaggcgattgttgaacgcgatgaagtgggcgcgcgcaaaaacgccgtcgatgaagagatcgaacgtttaagccagcctggcggctctgaagatcagcgtctgaacgcgctggcggagcgttttggtggtgtgctgctgagtgaaatttatgacgacgttagcctggaagatgcgccgtacttcagtgcgctgtatggcccgagtcgccacgccatcgtggtgccagatctgagtcaggtaactgaacacctggaaggcttgaccgattgcccggaagatctctatctgatcgaaggagatccgcagagtttcgatgacagcgtgttcagcgttgatgagctggaaaaagcggtagtggtgaaaatcgccgatcgtcagtggcgttatagtcgtttcccggaagtgccgctgtttggtcgtgctgcgcgtgaaagccgtattgaaagcctccatgccgagcgtgaagtgctttccgaacgcttcgccacgctctcctttgatgtacagaaaactcagcgtctgcatcaggcgttcagccgctttatcggcagtcatctggcggttgcgtttgagtctgacccggaagcagaaatccgtcaactgaacagccgtcgcgtcgaactggagcgggcgttaagtaatcatgaaaatgataaccagcagcagcgtattcagtttgagcaggcgaaagagggcgttacggcgctgaaccgcattctgccgcgtctcaacctgttggctgatgacagcctggcggatcgcgtcgatgaaatccgcgaacgtctggatgaagcccaggaagccgcgcgttttgttcagcagtttggcaatcaactggcgaaactggaaccgattgttagcgtattgcagagcgacccggaacagttcgaacagttaaaagaagattacgcgtactctcagcagatgcagcgcgatgcccgtcagcaggcgtttgccctgacggaagtggtgcagcgtcgtgcgcactttagctattctgacagcgcagaaatgcttagcggtaacagcgatctcaacgaaaaactgcgtgaacgtctggaacaggcggaagcggagcgtacccgcgctcgcgaagcgttgcgcggtcacgcagcgcagttgagtcagtacaaccaggtgctggctagcctgaaaagttcttacgacaccaaaaaagagctactcaacgatctgcaacgtgaattgcaggatatcggcgtgcgtgctgatagcggggcagaagagcgggcgcgtattcgccgtgacgagctgcatgcgcaactgagcaataaccgtagtcgccgcaatcaactggaaaaagcgcttaccttctgcgaagcggagatggacaacctgacccgcaaactgcgcaagctggagcgggattactttgagatgcgcgagcaggtagtgaccgccaaagcgggctggtgtgcggtgatgcgcatggtgaaagataacggcgttgagcgccgcttacaccgtcgtgagctggcttatctctccgctgatgatttgcgttccatgagcgataaggcgttaggtgcgctgcgtctggcggtggcggataacgaacatctgcgcgacgtgctgcgcatgagcgaagatccgaaacgtccggagcgtaaaattcagttcttcgtggcggtttatcagcatctgcgtgaacgtattcgtcaggatattattcgtaccgatgatccggtggaagctatcgaacagatggagattgaacttagccgtctgaccgaagaattaacctcccgtgaacagaaactggcgatcagttcccgcagcgtggcgaacatcattcgcaaaaccattcagcgcgagcagaaccgtatccgtatgctcaaccaggggttgcagaacgtaagctttggtcaggtgaacagcgtgcgtctcaacgtgaacgtgcgtgaaacgcacgccatgctactggatgtgctctctgaacagcacgagcagcatcaggatctgtttaacagcaaccgtttgaccttcagcgaagcgctggcgaaactgtatcaacgtcttaacccgcagattgatatggggcagcgcacgccgcagaccatcggtgaagaactgctggattaccgcaactatctggaaatggaagttgaggttaaccgtggttccgatggctggctgcgcgcagagtctggtgcattgagcaccggtgaggcgattggtaccggtatgagcattctggtgatggtggtacaaagctgggaagatgaatctcgccgcctgcgcggtaaagatatctctccttgccgcctgctgttcctcgatgaagcagcgcgactggatgctcgttctatcgccacgctgtttgaattgtgtgagcgtttgcaaatgcaactcatcatcgcagcgccggaaaatatcagcccggagaaaggcaccacctataaactggtgcgtaaagtcttccagaataccgaacacgttcatgtcgtcggcctgcgaggatttgcgccgcaactccctgaaacgcttccaggaactgacgaagcgccttctcaggcgagttaaaattaaggcggcagcaatgccgccttttctttttccgaaaactccgtttctgcactaaaaaagtggcacattacggcgcgcttttctttaaacttctttacattaggttatgtaaaaacgtatcggcgtttatatactgaagataagcctgatgagtaacaggcttgctcgtcatactttcgtgagtattggcgttgtacaggcaagtcgtaaaataacagcctggctattcagagtatgataaaaacagggggcaagggatgttgcttaatatgatgtgtggtcgtcagctgagcgcaatcagtttgtgcctggccgtaacattcgctccactgttcaatgcgcaggccgatgagcctgaagtaatccctggcgacagcccggtggctgtcagtgaacagggcgaggcactgccgcaggcgcaagccacggcaataatggcggggatccagccattgcctgaaggtgcggcagaaaaagcccgcacgcaaatcgaatctcaattacccgcaggttacaagccggtttatcttaaccagcttcaactgttgtatgccgcacgcgatatgcaacccatgtgggaaaaccgtgatgctgttaaagccttccagcaacagctggcagaggtggcgattgccggtttccagccgcagtttaataaatgggtagagttactgaccgatcctggtgttaacgggatggcacgcgacgtggtgctctctgatgcgatgatgggctatctccatttcattgcaaatattccggtcaaaggcactcgctggctatatagcagtaaaccttatgcacttgcaacgccgccgctcagcgtgattaaccaatggcagctggcgctggataaaggtcaattgcctacgtttgttgcaggactggcaccgcagcatccgcaatatgcggcgatgcatgaaagcttactggccttactctgtgacaccaaaccgtggccccaactgaccggcaaagcaacgttgcgcccagggcagtggagtaacgacgtaccggcgttgcgcgaaatattgcaacgcacaggcatgttggacggggggccgaaaattactctacctggcgatgacacgccaactgacgcggtagtcagcccatccgctgttactgttgaaacagcagaaactaagccgatggataagcaaacgacgtctcgtagtaaacctgcgcctgccgttcgcgccgcctacgataatgaactggtggaagccgttaaacgttttcaggcatggcaaggattgggggcagatggtgctattggcccggcaacacgtgactggttaaacgtaacgcccgcccagcgtgctggtgtgttggctctcaacatccagcgattgcgcttgctgccaacagagctttctaccgggatcatggttaacattccggcctatagcctggtctactatcagaacggcaatcaggtgctggatagccgagtcattgtcggtcgccccgatcgcaaaacgccgatgatgagcagtgcccttaacaacgtagtggtaaacccgccgtggaacgtacctccaactctggcacgcaaagatattctgccaaaagtgcgcaacgatccgggatatctcgaaagccatggctatacggtgatgcgcggctggaacagcagagaagcgattgacccatggcaggttgactggtctacaatcacggccagcaatttaccgttccgcttccagcaggctccaggcccacggaacagcctggggcgctataaattcaatatgccgagtagtgaggccatttatttgcatgacacgccgaaccacaatctgttcaagcgtgatacacgcgcattgagcagtggctgtgtacgagtgaataaagcttccgatctggcgaatatgctgttgcaggatgcaggctggaatgacaaacgtatttctgatgcgctgaagcagggtgatacacgttacgtcaatattcggcagagcattccggtgaatctctactacctgacggcctttgttggtgcagatggtcgtacccagtatcgtacagatatttacaattatgatctgcctgcgcgatccagcagccaaatcgtaagcaaagcggaacaattaatcaggtaaatgaagtagttcggggaaatcagttgtcgtaataattagcatgattgggggcgattctctgcagcccccgtcactgctggggttgagtcatcttgacgtctgctttacgggcggttaaggtgcctcttgtgcgccagaagtgcatataaacgataacattgacctgtagacttgattatcatggacaaattcgacgctaatcgccgcaaattgctggcgcttggtggcgttgcactcggtgccgccatcctgccgacccctgcgtttgcaacactctctaccccacgcccgcgcattttgacactcaataatcttcataccggagagagtatcaaagcggagtttttcgatggcagaggctatattcaggaagaattggcaaaacttaaccattttttccgcgattaccgcgcgaacaaaataaagtccatcgacccaggattattcgaccagttgtatcgcctgcaagggttgttaggcacgcgcaaaccggtgcaactcatttccggttatcgttctattgataccaacaatgaactacgcgcccgcagccgtggagtagcgaagaaaagctatcacactaaaggccaggcgatggatttccatattgaaggtatcgcgttaagcaatattcgcaaagccgcgttatctatgcgcgcaggtggtgtaggatattatccacgtagtaactttgtgcatattgataccgggccagcacggcactggtaataattgcttaacgaaacaggggcagtatgaactatcgtattattccggtcaccgcattctcccagaactgtagtttaatctggtgtgaacaaacccgtctggccgcactggtcgatcctggcggcgatgcggaaaaaatcaaacaggaagttgatgacagcggcctgacactgatgcagatcctgctgacgcatggtcatctggaccacgttggcgcagcggcggaactggcgcaacattacggcgtgccggttttcggcccggaaaaagaagatgagttctggctgcaaggcttgcctgcgcaaagtcgtatgtttggtctggaagagtgccagccgctgacgccagatcgttggctgaacgaaggcgataccatcagcatagggaatgtgactttacaggtgttacattgccctgggcatacgccgggtcatgtcgtgttttttgatgatcgggcaaagctgctgatttctggcgatgttattttcaaaggcggagtagggcgcagtgacttcccgcgtggcgatcataatcaactgatttctagtatcaaagataaattgctgccactgggggatgacgtgatatttattccgggtcacggaccattatccacacttggttatgaacgcctgcataatcccttcctgcaagacgaaatgcccgtctggtaaggcacataaaaaagcccgcttttaatgctggcctggatttctggcaaagtgcgctttgtttatgccggatgcggcacgagcgccttatccggcctacaaaatcgtgcaaattcaaaatattgcaggggacgcgtaggcctgataagcgtagcgcatcaggcaatgttgcgtttgtcatcagtctcagcccgcttttcagcgggcttcattgtttttaatgcttacagcactgccacaatcgcttcgcacagcggagccatgttatctggtgtcatcccggccacatttacgcgaccagaagcaaccgcatatacgccaaactcttcgcgcagacgcagcacttgttcttttgtcaggccactgaaggagaacatgccgttctgtttgatgataaagctgaagtcgcggtttgcgcctttttcctgcagcgtattgacgaacaactgacgcatacgctgaatacgctggcgcatatcagtcagctcttgttcccaaatcgcacgtaacgcatcgttgctcaggatggtggcaacaacagaagcgccgtgtgctggtgggttagagtagttagcgcgaatcgccgctttcatttggctgaatgcgcgatcaacggtttcactgtcggcagcaaccagagtacaagcgccaacacgctcgttgtacaggccaaagtttttagagtaggaactggcaacaatcagctctttatgcatagccgcgaaagcgcgcagtccttcagcatcttcttccagaccacgggcaaaaccctggtaagcgaagtcaaacagcggtaaccagcctttctcaacggagagttgtgccagtgtttgccattgttccagcgtagggtcgataccggttgggttatggcagcagccatggaacagcactacgtcgccagcctgagcttcattcaggctgttaatcagtgcatcgaagtcaagagtgtgattttccgcatcataataagcgtattcacgaacttccagacctgcagagttaaagacgctcttatggttcggccagcttgggttgctcacccacacacgcttaacgctggtattttttgccaggaaatcggcagccacgcgtagtgcgccagtgccccccggagtctgtgccgtgcgagcacgtttgtcattgatcagggcgctacctttaccaaacagcagttcctgagtgcagcgaccaaattcagggatgccgtcaatgccgaggtaatttttggtggtttcattttcgagcagatactgttcagcctttttcacgctggtcagtaccggggttttgcccgtctcatctttatagacaccaatcccgaggttaattttgccgggacgttcatcggcacgaaacagatcggccaggcccagaatcgggtcggcaggagcggcggtaatgttctcaaacatgacgaggttccattatggttacagaagggaagtccgctatcagggtaacgggagatttacaaaattccaactattactgatgaaaacgcaggctgtttttgcaagacgtgagattgctctggaaggtataaaaaaaacaggaccaaagtcctgttttttcggcatttaacaaagaggtgtgctattagaactggtaaacgatacccacagcaacggtgtcgtcactacctacgcccagtttgttgtcagaatcgatctggttgatgatgtagtcaacataggtggacatgtttttgttgaagtagtaggttgcgcccacttcaaagtagttcaccagatcaacatcaccgataccttctacgtctttcgctttagatttggtgtaagcgatggacggacgcagaccgaaatcgaactggtattgcgcaactaacagaacgtcttgcgttttgttggcgaagccgctggtgtttgtaaatttattagtgatcggcgtagcgttacgggtttcaccgtagttcgctgccaggtagatgttgttcgcgtcgtacttcagaccagtagcccactgttcagcttttttaccgttgccaagaggttgagcttcttgcaggttggtacggtcagctgcaccataagcaccaacgataccaaagccttcgtattcgtagctgatagaaccgccaacaccgtcgccgttagaacggcgtgcagtgtcacgctcgtttttacccaggtactgaacagcgaagttcaggccatcaaccagaccaaagaagttggagttacgataggtagcaacgccgccaacacgaccaacgaagaagtcatcgctgtatgcagtatcaccaccaaattctggcagcatatcggtgtaacccagtgcatcataaaccacaccgtagttacggccgtaatcgaaagaaccaacgtcagcgtatttaagacccgcgaatgccagacgcgttttgttaccagtttgagcgtcagcgccttcagagttgttaccctggaagttatattcccactgaccataaccggtcagatcggaattgatttgagtttcccctttaaaaccaagacgggcataggtcatgtcgccattgccaccgtaactgttttcaccgttacccttggaaaaataatgcagaccaacagctttaccgtacagatctactttgttgccatctttgttatagatttctgcagcgtttgcagtacctgctactaacagagcagggacgatcactgccagaatattgcgcttcatcattatttattaccctcatggttttttttatgacacctgccactgccgtcaataagttctgtcaataaaaatttacggaactattgatgagagtttggtgtctttatgtgtctgcaggcatctttccattcaaactaacgtttcgctaccgtgaaagtgctacaaagataaagatttggtttcaaaaagaaaaaatatgtaaccaaaagtaaaatttaaggaactttgtgaacaccgtcatatttccatagagacgtgatgatatttacagcaattttaatctatttatatgatttccttatatttaaattaactaaacggaaattttgtttctgatggaaactttatcgacctggcacaaaatcttctttcagacatccagaatgccaaaaaatagtatgaaaattgtgctattagctaagaaaaaactaatccgcaataagaatgcggattagtttttgcgcgtaaatgttgcaatgtaatattccgtaacaggatgatcgttatggcggggttgcaaatagattgcttgacttaacaaacagataacttgacagaaaagataaaaaaagagccagcgggcgctggctcttgaagacgctaaattagaagctggcgttacgcggagtacgtgggaacggaatcacatcacgtacgttttgcacgccagttacgtaagcaatcagacgttcaaaaccaagaccgaaaccactatgcggaacagtaccgtagcgacgcagatcgcgataccaccagtaatcttctttattcaggcccatttccagcatacgctcgtccagcacgtccagacgttcttcacgctgggagccaccaatgatctcaccgatgcccggagccagaacgtccatagccgcaacggttttaccgtcttcgttaaggcgcatatagaacgctttaatatctttcggatagtttttaaccactaccggtgctttaaagtgttcttccgccagataacgctcatgctcagaagagagatcgactccccagtaaaccgggttttcaaacttcctgccgcagttttcgagaatggtcactgcgtcggtataatccacctgcgcaaaatcggcttcaatgaagcgttccagacgactaacggcatctttatctacgcgttcagcgaagaatttcatgtcgtcagcgcgttcttcgagaaccgctttgaagacatatttcagcatggcttcagccagacccgcaatatcgttcaggttagcaaacgccacttccggctccagcatccagaattccgccaggtgacggctggtgttggagttttcagcacggaaagtcgggccgaaggtataaattttggacaatgcgcaagcgtaggtttcgccgttcaactggccagatacggtcaggaaagactctttaccaaagaagtctttgtcgaaatccactttgccctgatcgttacgcggcaggttttccagatccagcgtagaaacgcggaacatttcgcctgcaccttcggtatcagatgcggtaatcagactcgtactaacccagaagaatccctgctcgttaaagaagcgatgcagcgcctgcgccagcgtatggcgaacgcgcgcgacggcaccaatcaggtttgtgcgcggacgcaggtgagcgacttcacgcagatactcaatgctgtggcgttttgccgccatcgggtaagtgtctggatcttcaacccaaccagcaacttcaaccttgctggcctgaatttcaaattgttgcccctggcccgggctcgccacgactttacccgtcacaatgacgctgcagccggtggtcagacgcaggacgtcttcattgtaattgggcagagaattattgatgacagcctgtacaggatcaaagcaggaaccgtcataaacggcgaggaaggagatgccagctttactatctcggcgggtacgtacccatccgcgcacggtgacttcgctgtcaacggctacacggccctggagtacgtcggctacaggcacaacgctcataatattctctctgttaatagtcggaaaaaataaacacttgtccacccgtaaatggggggatacctatgttacctggcatctgcaatcagacaagcagaattcgcaaatgcagcgaaagatttcggaattaaaggtaaaaaaagggagccgattagctccctgatgatattaactggcttttttaatatgcggaaggtcgaacgctttgcgcagcgcccgaacaaacgctttatcatggcagatagttttgccagggctgtcagaaagtttcgccaccggtttaccgttacactctaccaacttaatgacaatattcaggggttttacctgggggatatcgcaggtcaggcgagtcccaataccaaaacttaattgcacgcgggaagagaagtggcggtatagctcaaccgctttgcgtaaatccagattgtcagagaaaaccagcgttttactctgtggatcaattcccagcttttcataatgtgcaatggctttttcaccccattcaaccgggtcgccagagtcatgacgcaggccctgataccgactagcgaactcgacaccgaaatcacgcaggaaagcatccatagtgatgcagtcggttaatgcaatgccaagttggtcgggatactcttccagccaggcagcaagtgcagctcgctggctgttggctagatccgggctgatttgctgatgtgcctggaaccattcgtgtgcctgtgttcccatcggcgtgagggaaagccgacgcgccagatcgtagttgctggtgcccacaaaccaggattcctgttgcagacgcttaacgatggtttcttgtacttcgcgagaaaaacggcgacgggtgccaaaatccatcagatggaagcggctcatatcaagaccggcggttaacgcgctgaagtcgactaatttgctttccagcgtgtcgagggcttgcgcaacgtcggcctgcggactgcgatagcgatgtaccatttcactgataaccgccagcaaaggaacttcccagaggatgacttcacgccacgggccgcttaaacgaatatccagcttgccattatcgttggacacggtgacttgttccgggttaaagcggaactcgcgtaaccagttaagatagtcggccttaaagaaaggcagggcagaaagccactgatattcatcatcctgcaggcgcaggtgctgcatcgcctgaacctgttcacgaatagcatcggcataaatacccagcagatcgtcacctcggcaacgaaactccgccgcgacatgcacatcgtaatagtgatgaaacacggcttgctgcatatgcaacttataagcatctgtatccagcaagctgtgcagaacaggagaagcgaattgtgtcataggtgcgcagtagcgtcctcgtacaggagcgtttagtacaataaacatcttcaggaactgctggagtataccttgtttcgcaatttattgaaccccgatcacaccatatgccacctttctggtcgatggcattacgcggtgtatgttataaaaatgtagcaataaaggcgtttgtacctgaaaagatgaagattctgcatagcgcgatttacgcaacaggaatagactgaacaccagactctataaaagatgctaaaggttatttatgactcaacagccacaagccaaataccgtcacgattatcgtgcgccggattaccagattactgatattgacttgacctttgacctcgacgcgcaaaagacggtcgttaccgcggtcagccaggctgtccgtcatggtgcaagtgatgctccccttcgtctcaacggcgaagacctcaaactggtttctgttcatattaatgatgagccgtggaccgcctggaaagaagaagagggcgcactggttatcagtaatttgccggagcgttttacgcttaagatcattaatgaaataagcccggcggcgaataccgcgctggaagggctttatcagagtggcgatgcgctttgcacccagtgtgaagccgaaggtttccgccatattacgtattatctcgaccgcccggacgtgctggcgcgttttaccaccaaaattattgccgataaaatcaaatatcccttcctgctttccaatggtaaccgcgttgcgcaaggcgaactggaaaacggacgccattgggtacagtggcaggacccgttcccgaaaccgtgctacctgtttgcgctggtggcaggcgactttgatgtactgcgcgatacctttaccacgcgttctggtcgcgaagtagcactggagctgtacgtcgatcgcggcaaccttgatcgcgcgccgtgggcgatgaccagcctgaaaaactccatgaaatgggatgaagaacgctttggcctggagtatgacctcgacatctatatgatcgtcgcggtggatttcttcaatatgggcgcaatggagaataaggggctgaatatctttaactccaaatatgtgctggcccgcaccgacaccgccaccgacaaagattacctcgatattgaacgcgttatcggccatgaatatttccataactggaccggtaaccgagtgacctgtcgcgactggttccagctcagcctgaaagaaggtttaaccgtcttccgcgatcaggagttcagctctgaccttggttcccgcgcagttaaccgcatcaataatgtacgcaccatgcgcggattgcagtttgcagaagacgccagcccgatggcgcacccgatccgcccggatatggtcattgagatgaacaacttctacaccctgaccgtttacgagaagggcgcggaagtgattcgcatgatccacaccctgcttggcgaagaaaacttccagaaagggatgcagctttatttcgagcgtcatgatggtagtgcagcgacctgtgacgactttgtgcaggcgatggaagatgcgagcaatgtcgatctctcccatttccgccgttggtacagccagtccggtacaccgattgtgaccgtcaaagacgactacaatccggaaaccgagcagtacaccctgaccatcagccagcgcacgccagccacgccggatcaggcagaaaaacagccgctgcatattccgtttgccatcgaactgtatgataacgaaggcaaagtgatcccgttgcagaaaggcggtcatccggtgaattccgtgctgaacgtcactcaggcggaacagacctttgtctttgataatgtctacttccagccggtgcctgcgctgctgtgcgaattctctgcgccagtgaaactggaatataagtggagcgatcagcaactgaccttcctgatgcgtcatgcgcgtaatgatttctcccgctgggatgcggcgcaaagtttgctggcaacctacatcaagctgaacgtcgcgcgtcatcagcaaggtcagccgctgtctctgccggtgcatgtggctgatgctttccgcgcggtactgcttgatgagaagattgatccagcgctggcggcagaaatcctgacgctgccttctgtcaatgaaatggctgaattgttcgatatcatcgacccgattgctattgccgaagtacgcgaagcactcactcgtactctggcgactgaactggcggatgagctactggctatttacaacgcgaattaccagagcgagtaccgtgttgagcatgaagatattgcaaaacgcactctgcgtaatgcctgcctgcgtttcctcgcttttggtgaaacgcatctggctgatgtgctggtgagcaagcagttccacgaagcaaacaatatgactgatgcgctggcggcgctttctgcggcggttgccgcacagctgccttgccgtgacgcgctgatgcaggagtacgacgacaagtggcatcagaacggtctggtgatggataaatggtttatcctgcaagccaccagcccggcggcgaatgtgctggagacggtgcgcggcctgttgcagcatcgcagttttaccatgagcaacccgaaccgtattcgtagcttgattggcgcgtttgcgggcagcaatccggcagcgttccatgccgaagatggcagcggttacctgttcctggtggaaatgcttaccgacctcaacagccgtaacccgcaggtggctagtcgtctgattgaaccgctgattcgcctgaaacgttacgatgccaaacgtcaggagaaaatgcgcgcggcgctggaacagttgaaagggctggaaaatctctctggcgatctgtacgagaagataactaaagcactggcttgataaataaccgaatggcggcaatagcgccgccattcggggaatttacccctgttttctcaggcgagtttcagattcaccacgttgcatcacccgttgcaacacctccgcttccagctccgctaatcgcacgctccctaatcgacgcggacgggggatatccactgtcaaatccagaccaatttttccctcttcaattaacagcacccggtcagccatcgctaccgcttcgctcacatcatgcgtcaccaacagtacggtaaagccgtgctcctgccaaagactcacaatcaaatcctgcatctcgagtcgcgttaaggcgtccagcgccccgagcggttcatcaagcaacaataatcccggtcgatgaatcaacgctcttgccagcgccactcgctgtttctgcccgccagaaagtgcggcaggccattcccctgcgcgattctccagtcctaccgcagccaacgctcgacgtgcggcatcgcgccactggcctttaaggcctaacccaacgttatcaatcacgcttttccacggtagcagacgcgcatcctgaaacatcattcgcgtgtcttcctgaatttcagccagcggtgtggtgcccgctaacacatcgcctgcggttggcgtttccagacctgccagcaggcgcagcagggtacttttgccaccaccgctgcggcccaccaccgccacaaactgacctgccggaatatgtaaatccagttggttcaggacgatattttccgcgtaatgtttgcttactgcattgagcaacaatggcgtgccctggttcagacgagcagtattcataccgtggcctccttcaaatgataagccgggttccagcgcaaccagaggcgctctaacagctgcgcgctgacgtcagccagtttgccgagcagggcgtaaagaataatagcgactaccaccacgtccgtttgcaaaaacccccgcgcattcatcgccagataaccaatgccactattggcagaaatggtttcggcaacaatcagcgtcagccacatcaggcccaacgcaaaacgcacgccgaccataatactgggcagggcaccaggcaggatcacatggataaacagcggtatgccggataatccatagctacgcgccatctccaccaacccgcgatcgatattacggatgccatgccaggtgttgatataaatggggaatagcgtaccgagcgccaccagaaagatttttgcggattcatcaatgccaaaccacaaaatcaccagcgggatcagcgccagatgcggcacgttgcgcaacatctgaatactggtatccagcagccgttctccccagcgagatagcccgctaatcagtcccaaaatcaaccccaggcttccgccaatactaaagccaatcagcgcccgccaggagctgatcgccagatgctgccacagttcgccgctggcggagagcgtccagaacgccgtcaccactccttccggactaggcaaaatacgcgtgctcagccagccaacgctggaggccagttgccacaccgccacgatgcccaccggtaaaaaccagggggcaacgcgcaataaccacttcttcactggcgttgccattatttcttccttagctttgcgcgactttacgggggataaaatcattcgccaccgcttcgccttgcggattcagcggctgcggctggggaatttccgggatggcgacatccagaagcgggaacagcaactcgccaacccgatacgcttcttccagatgcggatagccgctaagcacaaaactgtcgatgccaagcgcggcatattcgttgattcgcgcagcgaccgtaggaccatcgcccaccagcgccgtcccggcaccgccgcgcactaagccaacgcccgcccataaattggggctgatctccagattgtcgcgcttgccgttatgtaacgccgccattcgctgttgccctacggaatccgtccgggcgaatgcggcctgtgctttggcgatagtttcatcatcaagatggctgattaaccgctcggcggcctgccacgcttcgtcgttagtttcacgaacaatcacatgcagacgaataccgaaacgaattttgcgtccatgcgcggcagctttcgcccgcacttgttcgattttctctttaaccagttccggcggttcgccccaggtgaggtagagatcaacctgttctgccgccagctcctgggcgacatcactgcttccgccaaagtaaagtggcggatacggctgttgaatcgccgggaagagcagttttgctccgcgcacatgaatatgtttaccgttgaaatcgacggtttctctctgcaataaacgccgccagacctgggtaaattccgcgctggcttcgtagcgctcgctatgatcaaggaacactccgtcgcctgccagctcttgtggatcgctgcctgtgaccaggttaaacaacgcacgtccattactgagacggtcaagcgtggcggcctggcgggcggcaacggtaggactggttacgctgggacgcagggcgacaagaaacttcagccgctgcgtcaccgggatcatgcttgcggcaaccagccacgcatcttcgcaggagcgccccgttggaattagcacaccggtatagccaagacgatccgccgcttgcgcaatttgttgcagataaccgtgatcaaccgggcgactaccttcttccgttcccagataatgcccgtcaccgtgggtcggtaaaaaccagaacatattcagactcataattgttttccttccagttgagtgggctgccagatgcgctggcgaatatcgacttttttcggcaccagacgattttcataaaacagatctgccgtttgctgctgtaaggcggcaacctcggcgttaaccggtttgatggtggtaggagggcgatgatctaagtaagaggcaatcaccggtgccggtaagcccatcgtttttgccagtaaagcgatgctttgctcgcgctggctgcgggttaacgcatcggcctcactaaaggttgccagtacgccctgaataaaagcgccgtttttttctgcatagggacgagctgccagataaaagcttccagtttgattgagatcggtgccgtctttcagcacccgcacgccgccctgtaataatgcagcagagtagtagggatcccagatagcccaggcgtcaacgttaccttgctggaacgcggcgcgggcatcagcgggcgtcaggtaagtgggttggatatcggtaaacttaagtccggcctgacgcagtgcacgcagtaaaaggttgtgactactggaacctttctgaaaggcaactttgtgacctttaagatcggctacggttttgatcgggctgttttctgccaccagaatcacttcggctttgggcttcggtggctcgacgcccacgtacaccaaatcagccccggcagcctgggcaaagattggcggaatatccccggtactgccgagatcaatactgccaacgtttaacgcttccaacatttgcggacccgcggggaactccacccaggagattttactttccggatagcgtttttccagtaactggtggctttttgccagcaccataccaatactgcctttctgatagcctatacgtaacgcttcagggctggattctgcagcaaccgcaaaagtagagacgctaagcaatcccgccagcgccagtttaatgatgttacgcatgggcattacctcgcagagacagaaggtcaggaacctgaacatcgcggcggtgcaatgcctgccagaaagtttctagcgcggtatcaagacgggtttgcagatttggcgtgaactggggtctgtgatggtaatcaattacttgactgtcatcggcaaacacgccgtgcaggatctcctgagctttcagtgcgcttaaaactggtttaagggcataatcgaccgccagcagatgggccacggtaccgcccgtcgccagcggtagcaccactttgccttgcaaagcgcgttctggcagcaggtcgagcagggttttcaacgcaccggaataggcggctttatacacaggcgtggcgacaatcagcccatcggcctgttgcagctgttcggtgaaggtcttgagtgccggactatcgaaacgagcataaagtagatcttccggggcgaagttttgcagattccagtgataaacctctacatccaggccatttagtttttcccgcgcatattccagcaaggagctggagcgagaaggaaagcgaggactacccgccagggtgatgacacgcatactctctccttataaccaattgttctttttttgttaacattgataacaattcggtcagtctgtcggagagacaagaaaattccaaatataaattttgtgtatctttttctgaaaataaactaaagaaagggctttatatatcacgcatatttatttattggatagtcattagatgttgaatcaatgaattactcgttcagttaatatttaaatattcatgaaatctataaattaaagatttgtcacttattggatttagtatgcttgatttaaatggcggacaattattgttattattaagtctaatgtcatttaaaggcattatcatatttacgaagagatcaggatgataacgatgaaaaaaagtgtattgacggcgtttataactgtggtatgtgcaacgtccagcgttatggctgctgatgataatgctatcacggatggcagtgtaacatttaatggtaaagttattgctccagcttgtaccctggtagctgcgacgaaagattccgtggtgactttgccagatgttagtgccacgaagttgcaaaccaatggtcaggtttctggcgtgcaaattgatgtgccaattgaattaaaagattgtgatactaccgtaacaaaaaatgcaacgttcacctttaatggcactgcggatactactcagattacagcgtttgctaaccaggccagttctgatgctgctacaaacgtggccctgcaaatgtatatgaatgatggtacaacggccatcacgccagacacagaaaccgggaacattttgttgcaggatggagatcagacgttgacttttaaagttgattatatcgctacggggaaagcgactagtggtaatgtgaatgcggtaacaaatttccatattaactattattaatagaactcattaattgttttattaattagtacccctccagtgttctggaggggatattcatattttttaagagtgactatttatgaaaacttgcataacaaagggaattgtgaccgtaagtttaacggcaatattactcagctgcagttccgcatgggcggcaggtaaaggcgggattggacttgcagcaacacgtcttgtttatagtgaaggtgaagagcaaattagtctgggtgtacgtaacaccagtccggatgttccttatcttattcagagttgggtgatgaccccagataataaaaaaagtgcagactttattattacaccaccgctatttgtgctgaatccggcaaatgagaatctgttacgcattatgtacattggagcgccgttggcgaaagacagagaaacccttttcttcactagcgtacgggcagtccctagtacaacgaagcggaaagagggaaataccctgaagattgccacacaaagcgtcatcaaacttttctggcgaccaaaaggtttagcgtatcccttaggcgaggctccggcgaaactgcgttgcactagcagtgctgacatggttacggtcagtaacccaacaccttatttcattaccctgacagacctgaaaataggtggaaaagtagttaaaaatcaaatgatttccccctttgataaataccaattttctctgccaaagggggccaaaaatagcagcgtaacgtatcgaaccatcaatgactacggggcggaaacgccgcaactcaactgtaaaagctaagccgtcttcagttaagagagcgagatgtatagaactcatcgacaacacagcctgttaagctctggtggagtgccaagctttattggtgggctggtggtgtttgtgagcgcagcgttcaatgcacaagctgaaacctggttcgatcctgcttttttcaaagatgatcccagtatggtggccgatttgtctcgtttcgaaaaaggacaaaaaataacgccaggggtttatcgtgtcgatattgttctgaatcagacaattgtagatacgcgcaacgtcaattttgttgagataacgccagagaaggggattgccgcctgtttgacgactgaaagcctggatgcaatgggtgttaatactgatgcgtttccggcttttaaacaactggacaaacaagcgtgtgtgccattggcggagattattccggatgccagcgtaacgtttaatgtgaataaactccgtctggaaattagtgtaccgcaaatcgccatcaaaagtaatgcccgtggttatgtcccccctgaacgttgggatgaagggatcaacgcgctattactgggatatagctttagcggggctaacagtattcatagcagcgcagacagtgattctggcgacagctattttctgaatttaaacagtggcgttaatttaggcccatggagattgcgcaacaatagtacatggagtcgtagtagtggccaaaccgcagaatggaagaatctcagcagctatttgcaacgggcggttattcctctgaaaggcgaactgaccgtaggtgatgattatactgcaggcgattttttcgatagtgtcagctttcgtggtgtgcagctggcgagtgatgacaacatgctgccagacagcctgaaagggtttgcgcctgtggtgcgtggtatcgccaaaagcaatgcccagataacgattaagcaaaatggttacaccatttaccaaacttatgtaagccctggtgcttttgaaattagtgatctctattccacgagcagcagcggtgatttgttagttgaaatcaaagaagcggacggcagcgtcaatagctacagcgtaccgttctccagtgtgccattactccagcgtcaggggcgaatcaaatacgcggtgacactggcgaaatacagaaccaatagtaatgaacagcaggagagcaaatttgcccaggccacgttgcagtggggcggaccgtggggaacgacctggtatggtggtggacaatatgctgaatattaccgtgccgccatgtttggtctgggatttaacctcggcgatttcggagcaattagcttcgatgcgacccaggcgaagagtacgctagcagatcaaagcgaacataaaggtcagagttatcgttttctgtatgccaaaacgctcaaccacttgggcactaactttcaattgatgggctatcgctatagcacgagcggtttctacaccctttccgacaccatgtataaacatatggatggctacgaatttaatgacggtgatgatgaagatacgccgatgtggagccgttattacaatttgttttacaccaaacgtggcaaactgcaggtcaatatctcccagcaattaggcgagtacggtagcttttatttaagtggtagccagcaaacttactggcatacggatcaacaggatcggctattacagtttggctacaacacgcaaattaaagatcttagcctggggatttcctggaactacagtaagtcccgtggtcaacctgatgctgatcaggtgtttgctctaaatttttccctgccgctcaatctgttgctccccagaagtaatgatagctataccaggaaaaaaaattacgcctggatgacctctaacaccagtatcgataacgaagggcacactacacaaaacctgggtttaacggagacattactcgatgacggtaacctgagctacagcgtgcaacagggatataacagcgaggggaaaacggctaatggtagcgccagcatggattacaaaggggcgtttgcggatgcccgagtgggctacaactacagcgataacggcagtcaacaacaactgaactacgctcttagtggcagtttagttgcccatagtcagggcattaccctggggcaaagcctgggggaaactaacgttctgattgcagcaccaggcgcagagaatactcgtgtggcgaacagcaccgggctgaaaactgactggcgcggatataccgttgttccttatgccacttcttatcgggaaaatcgaatcgcacttgatgcggcgagcttaaaacgtaacgtggatcttgaaaatgcagtagtcaacgtggttcccaccaaaggggcgttggttctggcggagttcaatgcccatgcgggtgcaagggtattaatgaaaacaagtaagcagggtataccgctgcgttttggcgcgatagcgacgctggacggcgtacaggctaatagcggcataattgatgatgatggcagcctctatatggcgggtttaccggcgaagggaacaataagcgtgcgctggggcgaagctcccgatcaaatttgtcatatcaattacgagcttaccgaacaacaaattaactctgcgattacgcgaatggatgccatatgcagataatctttggagaaaaatgcgtgagtttactacgactattttttgccgccgtcttaatgttatggtgcgctcaaaccgctgcttatagcgggcagtgtcatactactcaggggaatccgtatattggcgtcaattttggcgttaaaaccctggaggaagaagcaaatacggcaggggtagttaaagacaaattttatcagtggaacgaaagcaatgattattatgtttcctgtgattgcgataaagacaatgtcagaagtggccgatgggcattcgccgcggatagtccgttagtctatttaggcgacaactggtacaaaattaatgactatcttgccgccaaagttttattgcaggttaaaggcagttctcctactgcggttcctttcgaaaacgtgggcacagggggggatacccgatggcatatttgcgaccctggcggtcaacgtttaggtgggcagggggcaagcggtaatagcggtagcttttccctgaaaatattgcagccgttcgttggcagcgtcgtcattcctcctatggcgctggcgcgattatatgaatgctacaacatacccgcaggtgattcctgcacgactacaggtacaccggttttagtgtattacctgtctggtacgatcaatagtcttggcagttgttccgtcaatgccggagagacaattgaagttgatttaggtgatgtcttcgctgccaatttccgtgttgtagggcataaacctcttggggccagaacggcagaacttgcaattccagtcaggtgtaacacgggaaacgcgggattagttaatgtcaacctgagtctgacggcaaccacagaccccagctatccccaggcgattaagacgagtcgtcctggcgtgggcgtggtggtgaccgatagccagaacaacattatttcccctgctggtggaacattaccgctctctattcctgatgatgcagacagtatcgcgcgaatgaatgtctatccagtcagcacgacaggtgtaccaccagaaaccgggcgatttgaagccacggcaacggtgagaataaattttgattaacgcgtgaacgtatgaagaaaaaaacgatatttcagtgcgttatcttgttctttagcattcttaacatccatgtcgggatggctgggcctgaacaagttagtatgcatatttatgggaatgtggtcgatcagggctgtgatgtcgccaccaaaagtgcattacaaaatattcatattggtgattttaatatcagtgattttcaggccgcgaataccgtaagcactgctgctgatttgaatatcgatatcaccggttgtgccgctggtattactggcgcggacgtcctttttagcggcgaggctgacacccttgcgccgacactgctcaaactaactgacacaggcggaagcggtggtatggcaacggggattgccgtgcaaattcttgatgcgcaaagtcagcaagaaatcccgctcaatcaggtccagcctcttacgcccttaaaagccggggataacacactcaaatatcaacttcgttataagtccacaaaggcgggagcaacgggcggtaatgcgacggcggttctctattttgatctggtttaccagtgaaggagtgatgttgaaacggataatctggattctgttcttattgggattaacgtggggctgtgagctatttgcccatgatggcacggtcaacattagcggaagctttcgccgtaatacatgcgtgctggcacaggatagcaagcaaatcaatgtgcagttaggcgatgtcagcctgacacgtttttctcatgggaattatggcccggagaaatctttcatcattaatttgcaggattgcggaacagatgtcagcacggttgacgtcacctttagtggaacccccgacggagtgcagagcgaaatgttgtccattgaaagtggtacggatgcagccagcgggctggcaattgcgattctggatgatgcgaagatattgattccgcttaaccaggcgagtaaagactacagcctacatagcggtaaggtgccattaactttttatgcgcaattgcgacctgtcaatagcgatgtgcagagcggtaaagtgaatgccagcgcgacatttgtacttcattatgactaatacgtggaacagattggcgctcttgattttcgccgttttaagcctgctggtggcgggtgaattgcaggcaggagtggtggtcggcggaacgcgatttatctttccggcagacagagaaagcatatctattttactgactaataccagtcaggaatcctggcttattaacagtaaaatcaaccgcccaacgcgttgggccgggggggaagcgagcacagtgccagcaccattactggccgctccgccacttattctcctgaagcccggtacgacaggcacgttgcgcttgctgagaacggaaagcgacatcttgcctgtggatcgcgaaacgctatttgagttaagcattgccagcgtgccatccggcaaagttgaaaatcagagcgtaaaagtggcgatgcgcagcgtatttaaactgttctggcgacccgaaggtttgccgggcgacccgctggaagcttatcaacaattacgctggacacggaatagccagggtgtacaactcactaacccaacgccttattacattaacctgattcaggtgagtgtaaatggtaaagcgttaagtaatgtgggagttgtgccgcctaaaagccagcgtcagacaagctggtgtcaggcaatcgcaccgtgtcatgtcgcctggcgggcgataaatgattacggcgggttgagtgcaaagaaggagcaaaatctgccctgaaacaggttcggaaaacgtttgcgttttttttgccgcaggtcaattcccttttggtccgaactcgcacataatacgcccccggtttgcacaccgggaatccaggagagttcatgtactaccccttcgttcgtaaagcccttttccagctcgatccagagcgcgctcatgagtttacttttcagcaattacgccgtattacaggaacgccgtttgaagcactggtgcggcagaaagtgcctgcgaaacctgttaactgcatgggcctgacgtttaaaaatccgcttggtctggcagccggtcttgataaagacggggagtgcattgacgcgttaggcgcgatgggatttggaagcatcgagatcggtaccgtcacgccacgtccacagccaggtaatgacaagccgcgtctctttcgtctggtagatgccgaaggtttgatcaaccgtatgggctttaataatcttggcgttgataacctcgtagagaacgtaaaaaaggcccattatgacggcgtcctgggtattaacatcggcaaaaataaagatacgccagtggagcagggcaaagatgactatctgatttgtatggaaaaaatctatgcctatgcgggatatatcgccatcaatattagtagcccgaataccccaggattacgcacgctgcaatatggtgaagcgctggatgatctcttaaccgcgattaaaaataagcaaaatgatttgcaagcgatgcaccataaatatgtgccgatcgcagtgaagatcgcgccggatctttctgaagaagaattgatccaggttgccgatagtttagttcgccataatattgatggcgttattgcaaccaataccacactcgatcgttctcttgttcagggaatgaaaaattgcgatcaaaccggtggcttaagtggtcgtccgcttcagttaaaaagcaccgaaattattcgccgcttgagtctggaattaaacggtcgcttaccgatcatcggtgttggcggcatcgacagcgttatcgctgcgcgtgaaaagattgctgcgggtgccagtctggtgcaaatttattctggttttatttttaaaggtccgccgctgattaaagaaatcgttacccatatctaattatttcttcgaattcctctttataagataatcagggctttattttcagccctggttgttttatattcatcgctgttgcttatttagacattttgtacttttattgttgaggttattaagcgaagcgacaatggattgtgttgctgcggttttatagggtaggggagaggcagatgcgaattaaaccagacgataactggcgttggtattacgatgaagagcacgatcgaatgatgctcgatttagccaatggtatgctatttcgcagtcgttttgcgcgcaagatgttgactccagatgccttttctcccgcaggcttttgcgttgacgacgccgcgctctatttctcttttgaagaaaagtgccgcgattttaatttatctaaagaacaaaaagccgaactggtgctgaatgcactggtagcaattcgctatctcaaaccgcaaatgccgaaaagctggcattttgtttcccatggtgaaatgtgggtgcccatgccgggcgatgcggcctgcgtttggttgagcgatactcacgagcaggtcaatttgctggtcgttgaatctggcgaaaatgccgcactatgcctgctggcacaaccctgcgttgttattgcgggtcgcgcgatgcagttgggcgacgccattaaaatcatgaacgacaggctgaaaccgcaggttaatgttgacagcttcagcctcgaacaggcagtttaacgcgccaacttaagtgcagtcttcggtacacagctacagcaaagaatggtgccatcatcgcccattgcactttttttcagcggcgtgacttcgccttctaaaagctgaacacggcaacttccacaaatgcccgcgcggcaagaataagggatacgaattccctgattttctaattgctccagcaacacctgttggttatttccacgaaatgcctgtccctgccagtcaatatctacatttgcgtccggttgttgcgtgatgttggcggtatcatcagcggcagctgcgccgtaaatttttgccggagccgttgccagaatttccacctcatcgccaacgcgaatcacgccgctattacgggcaattaaattctgaccaaaatcgacatcgccgttatcctgggcagtgcggaaagattgcaatgtttttaatggttcgcctgccggatgtttttgccctttttctgggctgacggtggtgaaaatacagcggctacaaggtttaaccacatcaaacaccacatcaccaatgcgaatcactttccagcgatcttcttcccaggcactcgcgccggaaaccaccagattggggcggaattgctccatttttacactggccggacaacgttgttggagatcacgtaagctggcttcgttagcaagaaggtaaggatagccatcagcaaaactcagaggtacagtgttgtggcgtttcacgcgccgggtcatttgtggccccacccagcgtaattgcacttcgcgggagaaaaatccacttagccatttgttgatcgcgtctggcgcaattcgcgcggtaaaatgtgtgccccaaacttcggttggtgcgtcttgtgtggcgaaatcagcaaaacgaacatatgcgctactgccatctggtgcggtgagatgcaagccatcatgcacaggactaggagtaaaccgtaccatctggggaaactggcgagcggtaataaacgtaccgtcaggttccgtgatcataaagatgcgatcgaaggccagaccactgacatctgccagagcatgtgtaagaccaatgccgcgcatgcttttaacaggatgaataaaaagccggattaatgtcgccacggtgcggtcctcaaatgaaaataagccctcaactttatgacatgacgcgcttattagctataatgcgcaacaattttcttagcgcctgtcccattaggctattttatttgtcagtttggccctgggttatgctcgaaatcctcacgtacttgtgtacgctccggtttctccgcgctgtccatgtccagactgactgcaacaattacgcctactgcggtaggctcttagagtaaaagtgacgatatgaattctctgtttgccagtacggcccgtgggctggaagagctgttaaaaactgaactggaaaacctgggggccgttgaatgccaggtggttcagggtggggtccatttcaagggcgacacacggcttgtttaccagagcctgatgtggagccgcctggccagccgtattatgttgccgctgggcgagtgtaaggtttacagcgatttagacctctatctcggtgttcaggcgatcaactggacagagatgtttaatcctggcgcgaccttcgctgtccacttcagtggtttgaatgacaccatccgcaacagtcagtacggcgcgatgaaagtgaaagacgcgatcgtcgatgctttcacgcggaaaaatctgccgcgtccaaatgttgatcgcgatgcgccggatatccgcgttaacgtctggctgcataaagaaaccgccagtatcgctcttgatctgagtggtgatggtttacatctgcgtggctatcgcgatcgtgctggtattgcgccgatcaaagaaaccctggcagccgctattgtgatgcgatccggctggcagccaggaacaccgctgctcgatccgatgtgtggttccggtacgttgctgattgaagcagcgatgctggcgaccgatcgcgcaccaggcttgcaccgtgggcgttggggctttagcggctgggcgcagcatgatgaagctatctggcaggaagtgaaagcggaagcgcaaactcgcgcccgtaaaggcctggctgagtatagctctcatttttacggtagcgacagcgacgcacgggtgattcaacgtgcacgcactaacgcccgtcttgcggggattggtgaactgatcacctttgaggtgaaagatgtcgcgcaactgaccaatccgctgccgaaagggccgtacggcacagtgttgagcaacccgccatacggggaacgtctggacagcgaaccggcgctgattgcgctgcatagcctgctgggtcggatcatgaaaaaccagtttggtggctggaatctctctttgtttagtgccagcccggatctgctaagctgcttgcagctgcgtgcagacaaacagtacaaggcgaaaaacggcccgctggactgcgtacagaaaaattaccacgttgccgaaagcactccagacagcaaaccggcgatggtagcggaagactacaccaaccgcctgcgtaagaacctcaaaaaattcgagaagtgggctcgccaggaagggattgaatgttaccgcctgtatgacgccgatctgccagaatataacgttgccgttgaccgttatgccgactgggtggtggtgcaggagtatgcgccgccaaaaactattgatgctcacaaagcgcgtcagcgtctgttcgatattatcgctgcaaccattagcgtactggggattgcgccaaacaaactggtgctgaaaacccgtgaacgccagaagggcaaaaaccaataccagaaactgggcgagaagggcgagtttcttgaagttaccgaatataacgctcacttgtgggtgaacctgacggattatctcgatactggtctgttcctcgatcaccgcatcgcccgtcgtatgctcggtcagatgagcaaaggcaaagatttcctcaacctgttctcttataccggcagcgccaccgtgcatgcgggattaggcggtgcacgcagcaccaccaccgtggatatgagccgtacttatctggaatgggcagaacgcaacctgcgtctgaatggcctgaccgggcgtgcgcatcgcctgattcaggccgattgcctggcgtggctgcgtgaggcaaatgaacagttcgatctgatctttatcgatccgccaaccttctctaacagtaaacgaatggaagatgcgtttgatgttcagcgcgatcatctggcgctgatgaaagatttgaaacgtctgctgcgtgcaggtgggacgatcatgttcagcaacaacaaacgtggcttccgtatggatctcgacggcctggcaaaactgggactgaaagcacaagaaattacgcaaaaaacgctctcccaggatttcgcccgtaaccgccagatccacaactgctggctgattaccgcagcctgaaaggaatagtaatgagtttaatcagtatgcatggcgcatggctgagcttcagcgacgcgccgcttctcgataacgcagaactgcatatcgaagataacgaacgtgtttgtctggtgggccgcaacggcgcaggcaaaagcacgttaatgaaaatcctcaaccgtgaacaagggctggatgacggtcgcattatttacgagcaagatttgattgtagcgcgtctgcaacaggatccgccgcgtaacgttgagggtagcgtttatgatttcgttgccgaaggcattgaagaacaagcggaatatctgaaacgctatcacgatattagccgcctggtgatgaacgacccgagcgagaaaaatctcaacgaactggcgaaggttcaggaacagctggatcaccacaacctgtggcagctggaaaaccgcatcaacgaagtgctggcgcaactggggttagatcctaacgttgcgctgagcagcctttccggcggctggttgcgtaaagcggcattaggacgcgcgctggtgagtaatccgcgcgtgctgttgcttgatgaaccgacaaaccacctggatattgaaaccatcgactggctggaagggtttttgaaaactttcaacgggacgattattttcatctcccacgaccgtagctttatccgcaatatggcgacgcgcattgttgatctcgatcgcggcaagctggtgacctatccagggaattacgaccagtacctgctggaaaaagaagaagccctgcgcgtggaagaattacaaaatgccgagttcgatcgcaaactggcgcaggaagaggtgtggatccgccaggggatcaaagcacgccgtacccgtaatgaaggccgcgtacgcgccctgaaagcgatgcgtcgcgaacgtggtgaacgtcgcgaagtgatgggtaccgcaaagatgcaggtggaagaggccagccgctccggtaaaatcgttttcgaaatggaagacgtttgctaccaggttaacggtaagcaactggtgaaagatttttctgcccaggttctacgtggcgacaaaattgccctgattggtccgaatgggtgcggcaaaaccacgctgctaaaactgatgctcggtcagcttcaagtggacagcgggcgtattcacgttggcaccaaactggaagtggcttatttcgatcagcaccgcgcggaactggatcccgataaaacggtgatggataaccttgccgaaggtaagcaagaggtgatggttaacggcaagccacgccacgtattgggctatttgcaggactttctgttccatccgaaacgggcgatgacgccggtacgtgcgctttctggcggtgagcggaaccgcttgctgctggcgcgtttgttcctcaaaccaagcaacttattgattcttgacgaaccgaccaacgatcttgatgtcgaaacgctggaactgctggaagaactgatcgacagctatcagggcacggtattgctggttagccacgatcgtcagtttgtcgataacaccgttacagaatgttggatcttcgaaggcggcggtaaaattggtcgttatgtcggcggttatcatgatgcccgtggtcagcaagagcagtatgtggcgctcaaacagcctgcggtgaaaaaaaccgaagaagccgccgcggcaaaagcagaaactgtaaaacgcagcagtagcaaactaagctataaattgcagcgcgaactggagcagctaccgcaattgctcgaagatctggaggcgaagctggaagccctacagacgcaagtggcggatgcttccttcttcagtcagccgcatgagcagacgcaaaaagtgcttgctgatatggctgctgcagagcaggagctggagcaagcctttgaacgctgggagtatcttgaagcgttaaaaaatggtggctgatcgcaaaatagtcgatttaaacagagacagctgacaacggtaaaattgcctgatgaactgggtttatcaggcatgaaaaccaacactttgttagtcatctgtaaaatagcgcatcattaaggagtaccaatgtgcgaacatcatcatgccgcgaagcacatcctgtgcagccagtgtgacatgctggtggcgttaccgcgccttgagcatggtcagaaagcggcatgtccccggtgtggcacaacgttaaccgtggcgtgggatgcccctcggcagcgtcccaccgcctatgcgttggctgcactgttcatgctgttgctgtccaacttgtttccttttgtgaatatgaacgttgcaggagttaccagtgaaattacattactggaaattcccggcgtgcttttttctgaggactacgccagcctcggcacctttttcctgttgtttgtgcaactggttcccgcgttttgtctgataaccattctgttactggtgaatcgcgcggaattaccggtccgtttaaaagagcaactggcacgggtgctttttcaactcaaaacctggggaatggcggagattttcctcgcgggtgtgctggtcagtttcgttaaactgatggcttacggcagcattggggtaggcagcagctttctcccctggtgtttattttgtgtcctgcaactgcgcgcttttcagtgcgttgatcgtcgctggttatgggacgacatcgccccgatgccagaactgcgccagccgctaaaaccaggcgtcacggggatacgtcaggggctgcgtagctgctcctgttgtacggcaatccttcctgctgatgaacccgtgtgcccgcgttgtagtaccaaagggtacgttcggcgtagaaacagcctgcagtggacactcgcgctgcttgtaacgtccatcatgctgtatcttccggctaatattttgcccatcatggtgacggatttattaggcagcaagatgccgagcacgattctcgctggggtcattctgttatggagcgaaggctcttatcccgtcgctgcggtgatctttctggccagtattatggtgccaacgttaaagatgatcgccatcgcgtggctgtgttgggatgccaaagggcatggcaagcgcgacagtgaaagaatgcatttgatttatgaagttgttgagtttgtaggccgctggagcatgattgacgttttcgttatcgcggtgctcagcgcgctggtgcgtatgggaggtttaatgagtatttatccggcaatgggtgcattaatgtttgctttagtcgtcataatgacaatgttttctgctatgacgtttgacccgcgtttgagctgggatcgtcaacctgaaagtgagcatgaggagtcctgacagtatggaatctaataatggggaagccaaaatccagaaagtgaagaactggtctcccgtgtggatatttcctatcgtcacggcgctcattggggcctgggttcttttttatcattacagccatcagggaccggaagtgaccctgatcaccgcgaatgcggaaggaattgaaggtggcaaaaccaccattaaaagccgtagcgttgacgtcggcgtggttgaaagcgccacactggctgatgatttgacgcacgttgaaatcaaagcgcggctgaattccggtatggaaaaattgctgcataaagacaccgtcttttgggtggtgaaaccgcagattggtcgcgaagggattagcggcctgggaacgctgctgtctggagtttatatcgaactgcagccaggcgcgaaaggcagcaaaatggataaatacgatttgctggacagcccaccgttggccccgcctgatgcgaaaggtatccgtgtgattctcgatagcaaaaaagccgggcagctcagcccaggagatccggtgctgttccgtggctatcgggtaggtagcgttgaaaccagcaccttcgatacacaaaaacgcaatatcagctatcaactgttcatcaatgcaccttatgaccgactggtgaccaacaatgttcgcttctggaaagatagtggcattgcggttgatctgacgagtgcagggatgcgtgtggagatgggcagtttgacaacgctgctgagtggcggtgtcagctttgatgtgccggaaggtctggatttagggcagccagtggcaccgaaaacagctttcgttttgtatgatgatcagaagagcattcaggatagcttgtacaccgatcacattgattatctgatgttctttaaagatagcgtacgcggtctgcaaccgggagctccggtagagttccggggtattcgcctgggtaccgtaagcaaagtgccattctttgcgccgaatatgcgtcagacatttaacgatgattaccgtattccggtactgattcgtatcgagccagagcggctgaaaatgcagcttggcgaaaatgcggatgttgttgagcaccttggcgaattgttgaaacgtggtttacgcggaagcctgaaaaccggaaacctggtcactggtgcactgtatgttgatctcgatttctatccaaatacgcctgcaataaccggtattcgtgaatttaatggttatcagattatcccgaccgttagcggcggcctggcgcaaatccagcaacgactgatggaagcgttggataagatcaacaaactgccattgaatccgatgattgaacaggcaaccagtacgctttctgaaagtcagcgcacaatgaaaaacctgcaaacgacgctggatagcatgaacaagatcctcgctagccagagcatgcagcagttgccgacggatatgcagagtacgttgcgtgaattgaatcgcagcatgcagggcttccagcctggctccgcagcctacaacaagatggtggcggatatgcagcgccttgatcaggtgttgcgagaactgcaaccggtgctgaaaacgttcaatgagaagagtaacgcgctggtatttgaagcgaaggacaaaaaagatccagagccgaagagggcgaaacaatgaaaaagtggctagtgacgattgcagcactgtggctggccggatgcagctccggcgaaattaataaaaactattaccagttacctgtggtgcagagcggtacacaaagtaccgccagccagggcaatcgtctgttatgggtagagcaggtcactgttcctgactatctggcggggaatggtgtggtttatcaaaccagtgatgtgaagtatgtgattgccaacaacaacttgtgggccagcccgttggatcaacagttgcgcaacaccctggttgccaacctgagtacgcaactgcccggctgggtggttgcctcccagcctctgggaagcgcccaggacacgctcaatgttaccgtaacggagtttaacggtcgctatgatggcaaggtcattgtcagtggtgagtggctgttgaaccaccagggacaactgatcaaacgtccgttccgtctggaaggagtgcaaactcaggatggttacgatgagatggttaaagtgctggccggtgtctggagtcaggaagccgcttctattgcacaagagataaagcgtctaccttaattataaagatttgtaaatataaccgtctccggtatgttgcctgaggcggtttttttgtctctaacgtgcggaaaaatttgttcctcttcacattttttgtacaaccgacatgcccgtgtagctcacaaatatgacagtggcgtgaattttgcgcattgacggcagttatgattcgcggtattgcttaactgtgattgcacatttagtaatcactgttttcttttccaccagaaaccagtatgagggaaacgaggcatgaagagacaaaaacgagatcgcctggaacgggcacatcaacgtggttatcaggccggcatcgccggacgcagtaaagaaatgtgtccctatcagacgctgaatcaaaggagtcaatggctgggaggctggcgagaagccatggcggacagggtagtaatggcctgattctgtctctttaaaaagaaacctccgcattgcggaggtttcgccttttgatactctgtctgattataatcagaaggcagacgtatcctggaacagaccgactttcaggtcgctggcggtatagatcagacgaccatcaaccagcacttcgccatccgccaggcccataatcagacgacggttaacaatgcgtttaaagtgaatacggtaggtcacttttttcgctgtcggcagtacctgaccagtgaatttcacttcgccaacgcccagcgcgcggcctttaccttcgccgcccagccagccgaggtagaaccctaccagctgccacattgcgtccaggcccaggcatcccggcataaccggatcgccaataaagtggcatccgaagaaccacagatccggattgatatccagttctgcttcaacataccctttgtcgaagttaccacccgtttcggtcattttgaccacacggtccatcatcagcatgttcggtgctggcaattgcgggcctttagcgccaaacagttcaccgcgaccagaggcaagaaggtcttcttttgtataggattcgcgtttatctaccatgttctctgtaagccttattttattgaagcacgcaggatagctaacacgtgtacgctgaacaagtccgatcagttcggaataaaccagttcagccaacgtaatggccatggaaaacggtgacgtccttcctgttggcttgcttgcgcgatacgttcctggatggtttgcatcagcgtcgtttggccttcgccatcccacaccagatttaataataacggcagtgcgtcagtcacatcgtctactgcccagatggtgaatttgccttcttctaccgctttcaccagttcactgtgaagacttaaatggcgaacgttagctgtggggataatgacaccttgtttcccggttaactcacgttgctggcaaatagcaaagaagccttcgattttctcatttaaaccaccgaccggctgggcgcgaccgaactgatcgacactacctgtgatagcgatactctgattcaccggcacatcggcgagggcgcttatcagggcgcagagttcagccatgctggcactatctccatcaacttcactgtaactctgctcaaatgtcaggcttgcactgaaggggatctgttgctcaagctgtagttcgctcatcaggaacgcttgcatgatcatcatccctttcgcatggatattgccgccaagctccgctttgcgttcgatgtcggtgaattcaccatcgccaatatgcacaacgcagctaatgcgagaaggttcgccaaaagcgcgtggatgacccggaaattcaatgacgctaagggcgttaatttgcccgatgcgttcgccttcggtttcaatcaggatttgctcctgaaggatctcatcctgcatacgttcagcgaggaaaccttcgcgccattcacgctgctgcagcattaagtttagctgctcgccggagaaggtgtcgccatcacacagggaggcgacctctttacactggcggaggatccactgcgggctaagcggaagtgtttcttgttcaccggtgtagcgtgctgcttcgcggataagtatcggccaggcatccgctcccggtgcaggtaagtgattatgtctggcggtaaatgtcacccagcgacaccactgggttacactctccgcatcgacaatctgcagagtatcttcaaattcgctataaatagcctgctcactaagctctggctccatctcctggaaatcagccaaactttcgcgttcgcctaccagaatgactttcagcttcaatggcatgctaggcacagagacggggagagggcggctctcatcaaacgcaacccagtcaaaacgctcgcggttaacgatatttttcagccgcatccacagcagaggttgcgccagcagtgtacgcaaagagataatgagaataccgccatttgcctgatgcaccagaccaggctgcagggtaatgtcgccattaaactggcgcaggcagccaaagagttgctccgcttctacccagtcggcagcgacaacttgcgttaaagtcgcaaaattatcatctgcactcactgcgtgacgtaagcggatggagtggccggaaacctcatagtgaccgcccaccagttggcctgcatcgctttgtagcgtacgcgcggcattggcaataagattcagatactcagactcttccggggccttcgccagcataaaagaggaggatgctcgcgtatgcagcaactgctccagcgcaaattgcagccgcggttgagtatcactgaataaaggatcgttttcgtcaatcaaatgtggctgagcaaatatttcctgatagctatcggtatcaggaaccaggtcacgccatgcaagtttcgtaatggtcaaagttgatgttttttagtctgttgtcaaagccgcgattataccgtaaccggcactacagcacacgtagaaagcaccgacaatactcctggcatgggcgttaaagctcacaggatggagattcttttcttcactggcctaaaaagctgatattctgtaaagagttacacggtaacattgagatcgctatgaaatatcaacaacttgaaaatcttgaaagcggttggaaatggaagtatctggttaagaagcatcgcgaaggggagttaatcacccgttacatagaagccagtgccgcccaggaagccgtcgatgtgttgctcagcctggaaaatgaacccgtgctggtaaatggctggattgacaagcatatgaatccggaactggtcaatcgcatgaagcaaaccattcgggcaagacgaaagcgccattttaatgcggaacaccagcatacgcgcaaaaaaaagcatcgatctggaatttattgtctggcaacgtctggctggtcttgcgcagcgtcgcggtaaaacgctttctgaaacgattgttcagctgattgaagatgcggaaaacaaagagaaatacgcgaataaaatgtcttctctgaagcaggatctgcaggcattgctgggtaaggaataactgacgaaagtcagttcaatttactaaaggcaaaaaaaaccccgcagcagcggggtttttctaccagacgagaacttaagcctgcggctgagttacaacgtctttgatacctttaacttcgatctctacgcgacgatccggagccaggcagtcgatcagtgcagcacgctgtttcacgttgtcacaggtgttgccagtaaccgggttggattcgcccataccacgtgcggagatcttgtctgccgggatacctttggagatcaggtaatcaacaacagactgagcacggcgctcggacagaccctggttgtaagcgtcagaaccgatgcggtcggtgtaacccagaacaactacggaaccgtctttcggatccaggttgctcagctggctgtacagctgatccagagcagcctgaccttccggtttcagggttgctttgttgaagttgaacagaacgtcagacttcagagtgaagtgcttggtctgtacttccggtgccggagctggagccggagcaactactggagctgcttcgccctgaccgaaacggtaggaaacacccaggctcagcatgccgttgtccggacgagtgccgatggtgtgtgcgtcaccgatgttgttggtccactggtattccagacgggtagcgatttcaggagtgatcgcgtactcaacaccgccagcgaagaccggagaaacgccggtgtcgtggtttttaccataaacgttggatttagtgtctgcacgccataccatgccacccagacgagtgtagatgtccaggtcgtcagtgattgggtaacccagtttagcggtcagttgaacgccctgagctttgtatgcaccgttttcaacgctgcctttgtacggcatacgacctaaccagtcgtaacccatttcaaagccaacatacgggttaacctggtaaccaccaaaagcaccagcgcccagttggttttcatgggtcgggccattgttgttgatgaaaccagtgtcatggtactgggaccagcccagtttagcaccagtgtaccaggtgttatctttcggagcggcctgcgctacggtagcgaaaccagccagtgccactgcaatcgcgatagctgtctttttcattttttgcgcctcgttatcatccaaaatacgccatgaatatctccaacgagataacacggttaaatccttcaccgggggatctgctcaatattaactctaccgatatcttcggcttatgccgagcacccctggcgatgtaaagtctacaacgtagttgaaaacttacaagtgtgaactccgtcaggcatatgaaaaaaaagtcttgtataaggtatgtttaatcttttttgtcagcgacaatttacagaagagaatcgcggaaaccgcttcagacaagcctccgcaaggaaaattagtcacgactgaaagcattggctgggcgacaaaaaaagttccaggattaatcctaaatttacttaatgatacaaattagagtgaatttttagcccggaaagttgtctcgtggcgtgagaggatgcgcttaccggacgcataataaaccccatagcgttaccttcatttgccgcatcaacaagttcagcatgctcttcttcagtcaaatcatctgccaaccaaccgatcaccacactgtaattgcccgtgcgtaaagcgcgaaccatactctccacagtgtggcaaggggagagctggctaatctgcattactttcgttaagggtagcccagatgcctgaacccattcccgactcagtttttgttgcggtgttaaccagagttgccagcggctttgctgaccgagttgctgtaacaatggcaacagtagaagttgcgtcatcatgggctgatcttcgcgatagacaacttcactgataagcccggctgtagtgttttccgtagagacacgcgcaattttacttgctgcggaactgaagctgctagaacgatgtgcatagccactagtgtacataatcaatccagcccctgtgagttactgtatggatgtacagtacatccagtgacaacaaagatcaaccctattttcggaaagagcctcgcaaattttgtcgttggtgacgggaaaacataaattaatcttgccccttaagaataagttgcctattttcgtagttaacggatccgttaatgtgaatcattcttttatgttatgattttaaaaggaattttatgaaaagcctctcctataagcggatctataaaagtcaagaatacctggcaacgttgggcacaattgaataccgaagtttgtttggcagttacagcctgaccgttgacgacacggtgtttgcgatggtttctgatggtgagttgtatcttcgggcttgtgagcaaagtgcacagtactgtgtaaaacatccgcctgtctggctgacatataaaaagtgtggccgatccgttaccctcaattactatcgggttgatgaaagtctatggcgaaatcaactgaagctggtgcgtctgagcaaatattctctcgatgcagcgctgaaagagaaaagcacgcgcaatacccgggaaagactgaaagatttgcccaatatgtcttttcatctggaagcgattctcggggaggtggggattaaggatgtacgggcgttacgtatacttggggcaaaaatgtgttggttgcgactgcggcagcaaaacagtctggtgacagaaaagattctgtttatgcttgaaggtgccattatcggcattcatgaagctgcgctcccggtggcacgccgccaggagcttgcagaatgggctgactctcttacgccgaaacaggagtttcctgcggaacttgagtaattacgcgctaacaggagtttcctgcggaacttgagtaatctggcgttgcagacgaccaatctcaggcagtaatgcaatcaataatccaacttgttgtacgaccagaggttctttgctgtctgcccgtggttcaagttgctgcatccgctgtttcaggctagctaatgcctcattgacgcgttcttcatcagcaggttgatgatgtaacgcgtcatcaacatagcaaactgcgtcatcaagaaacgccagaatttcaggattagttaactgctcccggtgagcaccgagggcactgatatagctggtaaacgtatggttaaggcacagcaaccgaaacgcggcttcgcgaatttgcggggtaacgttcggctcgctggacatattacttaccacgctcgccagctcagcatcacggttgtgtgcatcgcggcgggcaatacgatacgccagacggttatcacgcccctgatggtattgctccagtatggcatcgagataccgacagttggcctctgtggcacgttcgagcatgcgcggcagattgcgaaactgccagtcaggccagatgtagctcactgccgcccacgcaatggcacaaccaatcagcgtatcgattacgcgaggtaacgctacttcaaaaccttcacccagtaagttaaaacacagtagcaccaaaagtgtgatgaacatcgttgcatgagcgtattgcacgttacggaaggcaaaaaagagcacgccggtaataaccagcagcaccagctgcccttccagacttggcacaaaccacagcacaggaatgccaatggcgatacctaccagcgtaccaataatccttaacttcaggcggtggcgcgtggcgttatagtttggctggcagacaaacaaacttgtcagcaagatccaatacccgtgatgcattccggttatctgaatgatggcgtagccgaagcacaacaccaggctcattcttaccgcatgacggaagagggcggattccggcgtgaagtgacggctaagacgcagccagatatcactcaacccgtgcgggctgtcatcagcgagctcattttcgtcattattatggggtagtgcctgggcctgttcactttcaattgttgccagttgggcatcaatggcgcgtaaattgttcagcaaaaatcccagtgttttgagtaaatcggcgggtgcgccgttatcgcgcatccgctccagcgcagcatcaatatgcgtaaaagcgcgctcaaaatgcggatcatgttgataaggctgacgcaacaaaatacagcgactcagttgctggcacgcctggccctgcatgctcatcagccgctgaaaacggaacagcacgtcgctgtggcgaaaatgttcacgcaatgtttgatactgaatatgagaagagctggcacgctcgtgaatatcctgtgcgacaaagtaataatgcagcgtgcgacgcgttccccgttgaccacgatcgccacgtaagcgggtcagcaggctgagtttcgtctgattcaatgtcgccatcagcagaccgttggcgagagccaaatcgtacagcggtgcctggctttgatcttcaatatcaggatcaaacatgcggctcttgagctcaagataacgcgccagttgttcatagcaacgcgccaggttgtcctgcagcgggcggaccgggaacagcagatgaccaataagtgtcaggacgttgtaccagacggcaccggccagcagatacatcggctgctgataccagtgctcatacagacttgttcccaacatagtgtaaatggcgatcagcaatgcaccgaaggcaattgttgcatagcgttgacccagaccgccgagcaaaatgaagccgctggtagagagcgttaagccaatcgcaaatagccagggccagggaaacagcaattctacactggcgctggcgataaaaaagcagaacagcgtaatgatgaggttacgcaaacgtcccgccagtcggtcatcgagatcggtcagcgccgctgccaccatccccagcgttagcggaatcgtcagttttacatcacccagccaccacggaaacgctgtggttccacaaagcgcaataaaaatacgcgcgtaatacagccaggcgctgttccaggtatagcgtttgagcaaaggacttagcataaaggccatattagtggattattcaaaacgacgacgtgcattggcttcacgcgcagcttgcgctgtttctacgcttaccacgcgacgaccaaccggccatagtgcaatagcggcaattttaaagttcgcaatgccgacaggaatgccaatgatactaatacattgtgcgatgcccgttgcaatgtgcatcaggcataaccaccagccaaagaaaatcagccagaaaatattcaataccgtaccgccagtattcagcagcacatttttgccagccgggttcagttcatcgacatgaatagcttcattgccataaggcaccagagacagtttagtgatctcccagcaggatcgtgtcagcggtaaggtaaaaatcagcacaatactgaccagagtcgccaacagccagcccagagtggtggcaaatccgccaagcacaaagttcagaatgttcaaaacggtacgcataaaacctcgctttactgtggttttcagtaatgggcggcaattgtaacgtttttttgggctggagcacgttttctctgacggttacactgataagaaataatttcgtgtggatctacagagtcatggaactgaaagcgacaacgcttggaaaacgtctggcacagcacccttacgatcgggcggtgatcctcaatgccgggattaaagtctccggcgatcgccacgaataccttattcctttcaatcaattactggcgattcactgtaagcgcggtctggtatggggcgagctggaatttgtactgccggacgaaaaagtggtgcgtctgcacggcaccgaatggggcgagacgcagcgtttttaccatcatcttgatgctcactggcggcggtggagtggcgagatgagcgaaattgcgtctggtgttttacgccagcaactggatttgattgccacgcgcactggggaaaataaatggctgacgcgtgagcaaacctctggcgtgcagcaacaaatccgccaggctttgagcgcgttgccgttgccggttaaccgactggaagaattcgataactgccgtgaggcgtggcgtaaatgtcaggcctggttgaaagatattgaaagcgctcggttgcagcataaccaggcgtataccgaagccatgcttaccgagtatgcggattttttccgccaggtcgagtctagtccgctgaatccggcgcaggcccgggcagtcgttaatggcgagcattctctgttagtgctggcaggtgcaggaagcggaaaaacgagcgtgctggtggcccgtgcaggctggttgctggcgcgtggtgaagcgtcccctgagcaaattttattgctggcgtttggtcgcaaagccgctgaagagatggacgagcggattcgcgaacggctacataccgaagacattaccgcacgcacgtttcatgcgctggcgctgcatattattcagcagggcagcaaaaaagttccgatagtcagcaaactggaaaatgataccgctgcccgtcatgaactctttattgctgagtggcgcaagcaatgcagcgaaaagaaagcgcaggcgaagggctggcggcaatggctgacggaagaaatgcagtggagtgtgccagaaggtaacttctgggatgatgaaaaattacagcgtcgccttgcctctcgcctcgatcgctgggtaagtctgatgcggatgcacggtggtgcacaggcagaaatgattgccagtgcacccgaagagattcgcgatctgttcagtaaacgtatcaagttgatggccccgttattaaaagcctggaaaggtgcgctgaaggcagaaaacgctgtcgattttagcggccttattcatcaggcgattgtgattctggagaaaggtcgctttatcagcccgtggaagcatattctggttgatgaatttcaggatatcagcccgcagcgggcagcgttgttagcggcattacgcaagcaaaacagtcagacgacgttgttcgctgttggtgatgactggcaggcgatttaccgattcagcggtgcgcaaatgagcctcaccaccgctttccatgaaaactttggtgaaggcgaacgctgtgatttagacacgacttaccgttttaacagtcgtatcggtgaggtggcaaaccggtttattcagcagaacccaggccagctgaaaaagccgctaaacagcttaaccaatggagacaaaaaagccgtcacgttattggatgagagtcaacttgacgctttgctggataagctctctggttatgccaaaccggaagagcgcattctgatcctggcgcgttaccatcacatgaggcctgccagcctggaaaaagcggcaacacgctggccgaagttgcaaatcgactttatgaccattcatgccagcaaagggcaacaggcggattacgtcatcatcgttggcttgcaggagggaagtgatggttttccggctgcggcgcgggagagcattatggaagaggcgctactgccaccggttgaggatttcccggacgctgaagaacggcggttaatgtacgtggcgctgacccgggcacgccatcgggtatgggcactgtttaacaaagagaatccctctccctttgtggaaatactgaaaaatctggatgtgccggtggcgagaaaaccgtaagaaacaggtggcgtttgccacctgtgcaatattacttcagacggtccgcgagataacgctgataatcggggatcagaatatcgaccgcgtcgttgaaatgcgggctctggattatgaagtctgccgttgccacgttggtggcgaccggaatgttccataccgtcgccagacgcagcaaggctttcacgtcaggatcgtgcggcacggcatttagtggatcccagaagaaaatcaatacatcaattttcccttcactgatcaatgcgccaacctgctggtcaccccccattgggccactcaacatcgcgttgacgttcatgccggtcgcgcgggaaattaagttaccggtagtgcctgttgcatacagtacgtgttgttccagtaacggttgatgccgttccacccagctcatcagcatttgtttgcagtgatcgtgtgccaccagcgcaatatgtttccgcgcaggtaaagtgcgagtcgtcagttccataatgtacatccgtagttaactttcctacagattactgtaagcacttatcgctgcaagataaagaccgaaaaagcctgcgcacaggcacaaaaatctcaggaagatggttgtttttccgcccactgcaggaaagtatttcgcgtttgtgggtcagccagtttaaaccaatacttcagccgttgttctgtgagcacctgagactgcggtggaatagcatccagctcggaaacaccgctaagcagcgtactgtcatctgccatcatcgtggcaaattgcggtagactagcgcgtttcgcggatttgttatagcgttcaacctcgacctcataatcaatcgtttttgccgtactggtaatggcgagaatatccagctttaccggaatcggcgtcgcatcgccatccaacaattcaaggcgcggcgcggcatcaaaatggttagcttcccgctcattctccaggcgaggcaggcgaaaattgacctggttgatgagctgggtattaaaactgaccaccagcggtggggagatatacagccgttcttcactattggaaagatgaatcgtcttctcaacgcgaaacactaactgatgcggtccattatccagttcaatgctgtccgcaccgcgcagcagagagctggaaaccttcttgccgtcgagtaccagaagatcgacatcggtactaagccgcagcgtggtggcaaaaacggataccggcaaacataatgcaatcaaggtggtcacgatgccggttttcataggtagctcctgtcaaaagaccgcccgaataataatgtgtcaaaatttttctttaatcatacttactaacatatagacatatttcccgcttttgctctcattcattcgtattagctgcatggttggcatgtcggctttgtcgtacactttgttaaacagtctggaggaaataatgaaagaaaccgatattgcaggcattttaacgtccactcacaccattgcgctggtgggggcaagcgacaaacccgatcgtcccagctatcgcgtgatgaaatatctactcgaccaggggtatcacgtcattccggttagcccaaaagttgccggcaaaacgctgctgggccagaaggggtatggcacgctggcagacgttccggaaaaagtcgatatggtcgatgttttccgtaatagtgaagcggcgtggggcgtggcacaggaagctattgccattggcgcgaaaactctctggatgcaactgggggtgattaatgagcaagcggcagtactggcacgggatgccgggttaaatgtggtgatggatcgctgcccggctattgagatccctcgcctgggcctggccaaataaaaaatccccggaaggcaaaaaccttccggggatttgttcagggattagttacgcagacgcggggcctggagttgtttgcggatggtctgcgccagctcatccatggatggctgttcaggatgttcatcctgcaattcgctacttagctgggcttcagccaggtaggtatgaaccggtaggccgttatcgtcctccatcactacgtgataccacggagcggcgcgaagctcgtcattcaccgccagctcatcagggctcggttcagagaggctataaaccgggtcgatatccacgaccactccgagataacctaacagggaatggcggacctgctggccgataccgaatttgctggcaatcatagtcacctcccgggaaatctttacctttgatataagggtaaaattccacatttcaagttacatgacgcgacaggcaaaccctttcagatatagcccttccggataggtagcgatcaccggatgatcggctgcctgacggaactgctctataaattgtacatcacgaccggcatcaattgcggcatccgcgatgattttctgaaataaatcgctggtcatcagaccggaacaggagaaagtcaggagaataccgccttcattcagcagctgaatcgccagcatgttgatgtctttataaccacgacacgcgcccatcaactggcttttattctcaacaaacttcggcgggtccatcacgataacgtcaaatttttcaccgcgatcgcgataagtacgcagcaatttaaagacatcatcacggacaaactcagccttgctcagatccagtttgttcagctcaacgttctgccgtgcaatatccagcgcttcctgggaggtatcaacgctgacaacctggctgcaaccgcccatcagtgcgcttacggcgaaaccaccggtataggagaaacagttcagcacacgtttattttcaacgtagcggcgggtagccaggcggctatcacgctggtccaggtagtagcccgttttgtgtccgtgctgaatatccaccagcagtttcattccgtgttcttcaatcggcagcagggcaggtggcaactcgccggtgacggggccctgggtcagctccattccttcttttttacgtaccgcgacgtcgctgcgatcgtaaatgctacattccgggtacagcgtttgcagggcactaattaatgccgcgcgctgatattctgccccagcactcagcagttgcagcaccagaaaattaccgaaacgatcgatagtaatacccggcaggccatcagattctccggcgattaaacgatagctgtcgaggccatctttttgcgccagccagtcacgccatttttgtgcttgttgcaaacggcgggaaaaaaaagcaatgtcgatagactcagacgggtcaaacgtccagacgcgcgcccggatttggctagctgggctataagcgccgcgtgctaaccattttccctgatgatcaacaatatcgatggtttcaccgaggctggctttaccttccatgcgggcaacggccccggaaaagacccacggatggcgacgaagtaatgatttttcgcgccctttggctaacactaaacgtacactcataatttacttttctgtcgatgcaaagaaatgggcgtcattgtccggagttttccatggatttgcaacgcgtccattaaggataaggagagcagcaatgagcaaagtctgcataattgcctgggtttacgggcgagttcagggcgtaggatttcgctacaccacacagtacgaagcgaaaagactgggtttaaccgggtacgccaaaaatcttgacgatggcagcgtggaagtggttgcttgcggtgaagaagggcaggtggaaaaattaatgcagtggttaaagagtggcggcccgcgttctgcgcgtgtagaacgggtgctcagcgagccgcatcatcccagcggggaattaaccgattttcgtatccgttaaatacattttaccggttttggcaggccagcaattttggtggcttgcttagccggacctttcggaaacagtcggtataaatagcggctgttacctttttcttcgccaaatttattcgccatcgcttttaccagcatacgaatcgccggagaagtattgaattccagatagaaatcacgcacaaaacgcaccacttcccagtgttccggactcaggctaatcccttcgttctctgcaatcaccacagccagcggctcactccactggctgctttctttgagatagccttcggtatccgtttctatctctttaccttcgaagatcagcataattattactaccttaatcagactggcggcagtgtaacaaaaaacaaagccccgcataaagcgaggctatgaaagtgttagcgggtgagattaatcgcggctagcgaagcccagaatgctcagcaggctgacgaagatgttgtacaggctaacatacaggctaaccgtggcacgaatatagttcgtctcaccgccatgaatgatgttgctggtttcaaacaagatagcgccagaggagatcagaatgaagaccgcgctgatcgccagatgcagagcaggcagctgcaggaagatattcgcaaccataccaatcagcaccaccacaatacccgccatcagcataccgccgaggaagctcatatctttgcgggtggtcagcacatatgcagagcagcagaagaacactaacgccgttccgcccagtgccatagcgattacgtcacccattccggcagacagataggtgttcagaataggtccgaggatataacccagaaaaccggtaaaggcgaatgcggagataatcccggtcggcttattcgccgttttataggtcaggaacatcaaaccatacatacccaccagcgtcagaatcagacccggagatggcagcatcagcaccgtactggcagttgcggtaatcgcgctaaaggccagcgtcaggctcagcagaaaataggtattacgcagcaccttatgggtgctaagcagacttgtacggtcatgactagaactaacaatacgatccattgagtcactctctatgacagatgtaattaattaagcagcataatgataatgcgtaagggcacccagaagttttacccatctttacgcatttgatctggaacaggtttaacagcggattatcaggtcattaagcaaatataacgccctgagaatttcgacaggcaaaagaaaaaggggttagcatttagctaaccccttatcttattggaatgacgcgcactataaacatcccgatgcggcgtgtaaacccctaatttgtttgtttgcctgaaaaacagccaaaagtgcattgatagcgtgaaataacagcagattgatcatttcatcaccatgaattccttctcttttactcgtttagcaaccggctaaacatccccaccgcccggccaaaagaaaaataggtccatttttatcgctaaaagataaatccacacagtttgtattgttttgtgcaaaagtttcactacgctttattaacaatactttctggcgacgtgcgccagtgcagaaggatgagctttcgttttcagcatctcacgtgaagcgatggtttgccttgctacagggacgtcgcttgccgaccataagcgcccggtgtcctgccggtgtcgcaaggaggagagacgtgcgatatgaataacgaggaaacattttaccaggccatgcggcgtcagggcgttacccggcgcagctttctcaaatattgtagtctggctgccacgagcctgggattaggcgcgggaatggcaccaaagattgcctgggcgctggagaacaaaccgcgcattccggtggtatggatccacggtctggaatgcacctgctgtaccgaatcttttatccgctccgctcacccactggcgaaggacgtcatcctttccctgatttccctcgattacgacgatactttgatggctgccgccggaacccaggcggaagaagtctttgaagacatcatcacgcaatacaatggcaaatatatcctcgcagtagaaggtaatccgccgctgggcgagcaggggatgttctgtatcagcagcggtcgaccgtttattgagaaactcaaacgtgccgctgccggagccagcgcgattatcgcctggggaacctgcgcgtcctggggctgcgtgcaggccgcgcgacccaatccgacgcaggcaacgcctatcgacaaagtcatcaccgacaaacccattatcaaagtacctggctgcccgccgatcccggatgtgatgagcgccatcattacttacatggtgacctttgatcgcttgccagatgtcgacagaatgggccgtccgctgatgttctatggtcagcgaatccacgataaatgctatcgccgcgcccacttcgacgccggagagttcgtccagagttgggatgatgacgctgcccgcaaaggttactgcctgtacaaaatgggctgcaaagggcctaccacctataacgcctgttcctccacacgctggaatgatggcgtttctttcccaatccagtctggtcacggctgcctgggctgtgcggaaaatggtttctgggatcgcggtagcttctacagccgcgtggtcgatattccgcaaatgggtactcattccaccgccgataccgtcggtttaaccgcgcttggcgtggtggcagcggctgttggtgtgcacgcagtcgccagcgccgttgaccagcgcagacgtcataaccagcaacctacagaaaccgaacatcagccaggcaatgaggataaacaggcatgagcactcagtacgaaactcagggatacaccatcaataatgccggacgccgcctggtggtcgacccgattacgcgcatcgaaggccacatgcgctgcgaagtgaatattaacgatcagaatgtgatcaccaatgccgtctcctgcggcaccatgtttcgcgggctggagatcatcctacaagggcgcgacccgcgcgatgcgtgggcgttcgttgaacgtatctgcggcgtctgtactggcgtacacgccctggctagcgtttacgccatcgaagatgctatcggtattaaagtgccggacaacgccaatatcatccgcaacattatgctggcaacgctctggtgccacgatcatctggtgcacttctatcagcttgccgggatggactggatcgatgtgttagatgcgctgaaagccgacccgcggaaaacttccgaactggcgcaaagtctctcctcttggccgaaaagttcccctggctatttcttcgacgtacaaaaccgcctgaaaaaatttgttgaaggcgggcagttggggatcttccgcaatggctactgggggcacccgcagtacaaactgccgccagaagctaacctgatgggctttgcccactatctcgaagctctcgatttccagcgtgaaattgtcaaaatccacgcggtctttggcggtaaaaacccgcatccaaactggattgtcggcgggatgccttgcgccatcaacattgacgaaagcggcgcggtcggggcagtcaatatggaacgcctgaacctggtgcagagtattatcacccgcacggcggacttcattaacaacgtgatgatccccgacgccttagccatcggtcagttcaacaaaccgtggagcgaaatcggcactggtctttctgataaatgcgttctcagctacggcgcattcccggatattgccaacgactttggcgagaaaagtctgctgatgcctggcggcgcggtgattaacggcgacttcaacaatgtgctgccagtggatttggttgatccgcagcaggtgcaggagtttgtcgaccacgcctggtatcgatatcccaacgatcaggtcgggcgtcatccgttcgatggcatcaccgacccgtggtacaaccccggcgatgtcaaaggcagcgataccaacattcagcagctgaatgaacaggaacgctacagctggatcaaagcgccacgctggcgcggtaacgcgatggaagtggggccgctggcgcgcacgttaatcgcttatcacaaaggcgatgctgcgaccgttgagagcgtcgatcgcatgatgagcgcgttgaacctgccgctttccggtatccagagtacgttaggccgcattttgtgccgcgcgcacgaagcgcagtgggccgcaggtaagttgcagtatttcttcgacaagctgatgaccaacctgaaaaacggcaatctcgccactgcttccacggaaaaatgggaacctgcaacctggccgacagagtgccgtggtgtcggttttaccgaagcgccgcgcggggcgttaggccactgggccgccattcgcgatggcaagattgatctctaccagtgcgtggtgccgaccacctggaacgccagcccgcgcgatcccaaagggcagattggcgcttatgaagcggcgctgatgaacaccaaaatggcgatccccgagcaaccgctggagatcctgcgtactctgcacagctttgacccgtgcctcgcctgtagtacacacgtgctgggcgacgacggtagcgagctgatctccgtgcaggtgcgttaacagcgaaggagaatcatcatgcaacagaaaagcgacaacgttgtcagccactatgtctttgaagcgccagtgcgcatctggcactggttgacggtgttatgcatggcggtgttgatggtcaccggatactttatcggcaagccgctaccttccgtcagcggcgaggcgacgtatctgttctatatgggctacatcaggttaattcacttcagcgccgggatggtttttaccgtggttttgctgatgcggatctactgggcttttgttggcaatcgatactcccgcgagctgtttatcgtgccggtatggcgtaaaagctggtggcagggcgtgtggtatgaaatccgctggtatctgtttctggcaaaacgtccgagtgccgatataggccataatcccatcgcccaggcggcgatgttcggctatttcctgatgagcgtctttatgatcatcactggttttgcgctgtacagcgaacacagccagtacgctatttttgcgccgttccgttatgtggtggaatttttctactggacgggtggcaacagtatggacattcacagctggcatcggctggggatgtggctgattggcgcgtttgtgatcggtcatgtctacatggcgctgcgtgaagacatcatgtccgacgacacggtgatctccaccatggtcaacggctaccgtagccacaaatttggcaaaataagtaacaaggagcgtagttgagctaaataagtaacaaggagcgttcatgagcgagcaacgcgtggtggtcatggggctgggcaacctgctgtgggccgatgaaggcttcggcgtgcgggtggcggaacggctgtatgcccattaccactggcccgagtatgtggagattgtcgatggcggtactcagggactgaacttgctggggtatgtcgaaagcgccagccatctgttgattctcgatgccattgactacgggctggaacctggaacgctgcgaacctatgccggagaacgcattccggcttatctcagcgcgaagaaaatgagcctgcatcagaacagtttctccgaagtgttggcgctggcggatatccgcggacatctgccagcacatattgccctcgtcggtctgcaacccgcaatgctcgacgactacggcggtagcctgagcgaactggcacgggagcaactgcccgctgcggaacaggcggcgctggcgcagcttgctgcgtggggaattgtgccgcaaccggctaatgaaagccgctgtctcaattatgactgtctgagcatggaaaattacgaaggcgttcgcttgcgccagtaccggatgacacaggaggagcagggatgagcaacgacacgccatttgatgcgttgtggcaacgaatgctggcgcgcggctggacgccagtcagtgaatcccgtcttgacgactggcttacgcaagcgccagacggcgtggtgttattaagcagtgacccgaaacgcacgccagaggtcagcgataatccggtaatgattggcgaattactgcgcgagtttcccgactatacatggcaggtggcgattgctgaccttgagcagagcgaagccatcggcgatcgctttggcgtctttcgctttcctgccactttagtgtttaccggcggaaactatcgcggcgtgctgaatggtattcacccgtgggcggaactgataaacctgatgcgcgggcttgtcgaaccgcagcaggagcgtgccagttgatctaaccgcagcaggagcgtgcctcatgagcgaaacttttttccatctgctggggccaggaacgcaaccgaacgatgacagtttcagcatgaatccactgccgatcacctgtcaggtgaatgatgaaccgagtatggcggccctggagcaatgtgctcacagcccgcaggtgattgcgctgttaaacgagttacaacatcaactaagcgaacgccaaccgccgttgggcgaggtgctggcagtcgatctgttaaatctcaacgccgacgatcgtcactttatcaatacgcttctcggggaaggggaagtgagtgtgcgcattcagcaggctgacgacagtgaaagtgaaatacaggaggcgatcttctgcggattatggcgggtgcgcagacgtcgcggcgaaaagttgctggaggacaaactggaggctggctgcgcgccgctggcgttgtggcaggcggcaacgcaaaatctcttgccgacagatagcctgttaccgccgcccattgatggcctgatgaatggcctaccgttggcgcatgagttactggcacatgtacgtaaccccgacgcgcagccgcacagcattaatctgacgcaattacccatcagcgaggctgatcggctttttctcagtcgtctctgtgggccgggaaatattcagattcgtaccattggctatggcgagagctatatcaacgccacggggttacgccatgtctggcatttacgctgtacggacaccttaaaaggcccgttactggaaagttatgaaatctgcccaataccggaagtggtgctggcagcgccagaagatttggtcgactctgcgcagcggcttagcgaggtatgtcagtggctggcggaagctgcaccgacgtaaaaagacggtaagtatcgctttcagtcttatgaatatcgcaatcggcgaatacctctggtcgtagagtttcaggataaagagggagatctaccattatcgggttatttttctctcttcgcctacaggagtgcgcatgtgggatgtcattgatttaagccgctggcagtttgctctgaccgcgctgtatcactttttatttgtaccccttaccctggggctgattttttttgctggctattatggaaaccatttacgtggtcaccggcaaaacaatctaccgcgatatgacgcgcttctggggtaagctcttcggtatcaattttgctcttggcgtggctaccggcctgaccatggagtttcagtttggtactaactggagtttctattccaactatgtgggcgatatttttggcgcaccgctggcgatggaagcattaatggccttcttcctcgaatccacctttgtcgggctgttcttcttcggctggcaacggctgaataaataccagcacctgctggtgacgtggctggtggcgttcggtagtaatctctctgcgttgtggatattgaatgccaacggttggatgcaatacccgaccggtgcgcattttgatatcgacaccctgcgtatggagatgaccagcttcagcgagctggtctttaatccggtcagccaggtgaaatttgtgcacaccgtaatggcgggctacgtgaccggggccatgtttattatggcgatcagcgcctggtatttactgcgcggacgggagcgcaatgtcgcattacgcagctttgccatcggttccgtcttcggtactctggcgattatcggtaccctgcaactcggagacagttctgcgtatgaagtcgcgcaagtacaaccggtaaaactggcggcgatggaaggggagtggcaaacggaacctgcacctgcaccgttccatgtggttgcctggccggaacaggatcaagagcgtaacgcctttgccctcaaaattcccgcgctgctagggatcctcgccactcacagtttagataaacccgtgccgggtctgaagaatttgatggctgaaacctacccacgcttgcaacgcggacgtatggcctggctgttaatgcaggaaataagccaaggcaatcgtgagccgcatgtgttgcaggcattccggggactggaaggtgacctgggctacggcatgttgctctcccgctatgcgccggatatgaatcatgtcacagccgcacagtaccaggcggcgatgcgtggcgcgatacctcaggttgcgccggtattctggagtttccgcatcatggtgggctgtggttccctgctgctactggtgatgctgattgcgcttgtccagacgctgcgtggcaaaatcgaccagcatcgctgggtgctgaaaatggcgctctggagtttgccgttgccgtggattgcgattgaagccgggtggtttatgaccgagtttggtcgtcagccgtgggcgatacaggacatcttaccgacatactccgcgcactccgctttaaccacaggacaactggctttcagtctgatcatgatcgtagggctttacaccctgttcttaatcgccgaagtctacctgatgcagaaatatgcccgtctggggccgagcgcgatgcagagtgaacaaccgacgcagcaacaggggtaaaggagaaaatcatgtttgattatgaaacattgcgcttcatctggtggctgctgattggcgtgatcctggtggtctttatgatctccgacggatttgacatggggatcggctgtctgctgccgctggtggcgcgtaatgatgatgaacgccggatagtgataaacagcgttggtgcacactgggaaggcaaccaggtctggttgatcctcgctggtggggcattatttgccgcctggcccagagtgtatgcagcggcgttttccggcttttatgtggcgatgatcctggtgctgtgcagtctgttcttccgcccgctggcctttgattatcgcggaaaaatcgccgatgcacgctggcgtaaaatgtgggacgccggtctggtcatcggcagtctggtgccgccggtagtcttcggtatcgccttcggcaacttgttgctcggcgtgccgtttgccttcacaccgcaattacgcgtggagtatctcggcagcttctggcaactgctgacgccattccctttattgtgcggattgctcagccttgggatggtgattttgcaaggtggcgtctggttacaactgaaaactgttggtgtgattcatctgcgtagtcagctggcgaccaaacgcgctgcactgttggtgatgctgtgctttttgctggcgggttactggctgtgggtcggtattgatggctttgtactgctcgcccaggatgctaacggtccttccaatccgttaatgaaactggtggcagtgctacctggtgcctggatgaataattttgtcgagagccccgttttgtggatcttcccgctgctgggattcttctgcccattgctgacggtgatggcgatttatcgtggtcgcccgggttggggatttttgatggcaagtttgatgcaatttggcgtgattttcacggcaggcatcacgctgttcccctttgtcatgccgagtagcgtgagtccgatctccagcctgacgttgtgggacagtacttccagtcagctgacgctgagcattatgttggtaatcgtgctgatatttttgcccattgtgttgctctacactctctggagctactacaaaatgtgggggcgcatgacaacagaaactctccgccgtaacgaaaacgagttgtactaaggagcagaaacaatgtggtatttactttggttcgtcggcattttgttgatgtgttcgctctccacccttgtgttggtatggctggacccgcgtctgaaaagttaacgaacgtaggcctgatgcggcgcattagcatcgcatcaggcaatcaataatgtcagatatgaaaagcggaaacatatcgatgaaagcgatcttaatcccatttttatctcttctgattccgttaaccccgcaatctgcattcgctcagagtgagccggagctgaagctggaaagtgtggtgattgtcagtcgtcatggtgtgcgtgctccaaccaaggccacgcaactgatgcaggatgtcaccccagacgcatggccaacctggccggtaaaactgggttggctgacaccgcgcggtggtgagctaatcgcctatctcggacattaccaacgccagcgtctggtagccgacggattgctggcgaaaaagggctgcccgcagtctggtcaggtcgcgattattgctgatgtcgacgagcgtacccgtaaaacaggcgaagccttcgccgccgggctggcacctgactgtgcaataaccgtacatacccaggcagatacgtccagtcccgatccgttatttaatcctctaaaaactggcgtttgccaactggataacgcgaacgtgactgacgcgatcctcagcagggcaggagggagtattgctgactttaccgggcatcggcaaacggcgtttcgcgaactggaacgggtgcttaattttccgcaaagtaacttgtgccttaaacgtgagaaacaggacgaaagctgtagtttaacgcaggcattaccaagcgaactcaaggtgagcgccgacaatgtcagtttaaccggtgcggtaagcctcgcaagtatgctgacggagatatttctcctgcaacaagcacagggaatgccggagccggggtggggaaggatcaccgatagtcaccagtggaacaccttgctaagtttgcataacgcgcaattttatttgctacaacgcacgccagaggttgcccgcagccgcgccaccccgttattagatttgatcaagacagcgttgacgccccatccaccgcaaaaacaggcgtatggtgtgacattacccactagtgtgctgtttatcgccggacacgatactaatctggcaaatctcggcggcgcactggagctcaactggacgcttcccggtcagccggataacacgccgccaggtggtgaactggtgtttgaacgctggcgtcggctaagcgataacagccagtggattcaggttagcctggtcttccagactttacagcagatgcgtgataaaacgccgctgagtttaaatacgccgcccggagaggtgaaactgaccctggcaggatgtgaagagcgaaatgcgcagggcatgtgtagcttggcaggttttacgcaaatcgtgaatgaagcacgcataccggcgtgcagtttgtaatgcataaaaaagagcattcagttacctgaatgctctgaggctgatgacaaacgaagaactgtctaatgcgtagaccggaaaaggcgttcacgccgcatccggccactttcagtttgcaatacgtacgcttgagatcaggattgtctactttgagtataacatccttgtgaaatctccctttcctcataccgcttgcactatatactgcgggtaggaaaggcgcgcagagggaaatataagattgttaactatccccctctggaaatacgacttgtgagcataagataaatcttagcaaaatacaaattaaagataaggaaattgttacgaaagctattaattattgttggtaatatagtttcaagtggtactataactggctgttaaatggcatttataactattaggtgcagagatattcgcttaaatggattagtttctttgtggaaaagtaactgatgttataatgtatgatgttgactatttcactattccaataaaaccagtcagctttaaacaagcagcgtcatattaagagagataaacatttgccgctgttggtcctcgcaggccatttacgcggcaaaattccacacgtaatcctggtataagcacttctgcgtcgcggggagtgaatgcggaaatatggacctgaacttctttacgaccgtcggaggggataatgaatcctttgccgcttttgcgatcaaaggttttgacaattcctgtcattttacgggacaaacaaattccttactgaaaatactgcgctgcactatacggggttaataaaataaagccagcgatatttaagaccgccggacggctaaaataaaatttgcttaatctcaattatcatgcgttaatagctgcgtcggtttgaaagacagacagcatacaaagtagtttactaaagcagttctcattatcaggcattatccccttcttttgagtctctctcctgaacactaagtagtttctgtattaaagccctgtttgccgaaaggcccaaaatgaaggaagtaaaatatgtctaataaaatgactggtttagtaaaatggtttaacgcagataaaggttttggctttatcactcctgatgatggcagcaaagacgttttcgtccatttcaccgccatccagagcaatgaattccgcacgctgaacgaaaatcagaaagttgaattttctattgagcaggggcaacgtggccccgcggcagcgaacgttgttacgctctaaggttgccattattactcaacatctccatttccgctgtccatgttgtcatggttcacagtaccgcacatcggcattcgatgtgacggagcgaaaccctttgggcgctaagtgtattttttgtaaatcgacgatgatcacctttgataacgtcgcgctgcaaatacgcactgaccatgcgccgctggattagtcaaaataatatcaggctccctcgtggagccttttttatatctgccttatttttcttcaacgctgtatgtatagtaagcgataacctgttgattattgaatctttcggggagatggcttataacatttcttacctgaccagggtaccgggaaccaacaccttactggcgtgttgctgtcttttaagaccagaagaggttaacagtgaatattgaagagttaaaaaaacaagccgaaacggaaatcgccgactttatcgcgcaaaaaatcgccgagctgaacaagaatacagggaaagaagtctctgaaattcgcttcaccgcacgagaaaaaatgaccgggcttgaaagttatgatgtcaaaatcaaaataatgtgattttgtgaacatcaccccgtgcgaggtgatgttccgcttgttgctaatttagtgaccaatcattggcgcttgtggaattaagcgtcggtacaattcctccggcaccgggctttgccatactcccgcatacattgcgtaaccaatcaccgcaaacataatccccagaaccagtagcgtcattaaccagccagacaacgcaaaggcttttttatttgccgcaggtttttgcagactaaaggtcaatgtactggctaccggacaactctctacgcaagtcatacagccggtacattccactgttcgtacctgaattaatttatcgaccgggatccgacttgggcaattttttgcgcatttgccacagtcgatacaactttcggcattgcgacgaatcttaaacgggctcaataggctaaccacgcccatcagcgcgccatatgggcaaagataacgacaccaggcatggcgaataaacaggctggcaatcagcaaaacggtcacgctgattaatgtcgcggtccccatatgacgaaagaaatcgagcattttaacgtccatcaccacgctgtaggggctcaacataaaatagtgaatcgcctgagcgggcatcaataacgcgatatagataaaaaaactcaacagcaaatacttcacgccgcgcagaggaatatccagccagcggggaaggacacattgccgaccaaacagtttgttaccgagatcgccgattaattcagaaagcgtaccaaccgggcataaccaactgcaaaaggcctttttgagtaatagactgatgacgataaaagcgaccaataacagcatcgcggcggcgtggacggacggtaactgacctgttacaaggctatatttcagattcatcagcccggcaatcggtagccagccttcgatacctcccggtctggcgacaaatgtcgtgctacttgccgtttcgtaatagcgcacccaataccagaacgtgatggcaatataaatattcattgccaacagtaataattgcgtcgctttacgccaggtcgtggcattacgccagtcattccacggtaatttgccgcccgtcgtgcctggccgccgctgccagcgggttcttttattctctgccatgattttgccagtccgttaagttgtataccaaatgccactattctagttgttcttaactggctgatattgattcaaatcgcgttcaggtctttcttatgcaaccatgcttccagagcggcaacactgcgtgtaatttcttcgtgtggaaggggggcagataatggctgctgctccagttgtgcgcatagctggctggcgatatgcattcccagactgctgcaactgctttttagctgatgcgcggcacgctttattttctcgctatcctgactggcgcgggcaatgtcgatttcatcgagaagcggcagggcatgttgtgtaaataataccagccattcgtggatcttctccgtccccattaactgagcatcttcattgagttggcttacatccaggctttgatcattattgacttgcagttggagatagtgcgccagtaactgaccgagcacttcacgcggcaccggtttagggataatcccgcggaataaactactggtacgctggcgcagcgtttcgtcaatgacatgggcgctaaagccaatcaaaaccaggctcggatattgctgtgccagttgtcgggcaagcgtaatgccgtcgatatccggcagatcaaaatccaccagtgcggcagcaaacggttcgctattttgcagtgtctctaaagcctgcgcggcattgccaacagcaacaatctgcgcaccactggttttcagcatctcaatggtaattcgctgggttagcgggttatcttcaattaacagcaaacgtaaaccgtcaagacgcaccgcctgattgactgtttttggcacgggtgccgtggcaacacgtaacggcaagcgtaaacaaaaacagcttccaacctccggcgtgctggtggcgctcagttcgccgcccatcgcctgggccagacggctactgatagtcagtcccagcccggtgccgccgcgtttgccgcttacctgcacaaatggctggaagatttctgccagtttcgcgggatcaataccgcagccgctgtcttccacttcgaccagccattgctcgccatcagtgcgactacgcaggataatgtacccttcgtcagtaaaacgcagggcgttgctcaacaggttggttataacctgacgaatacgtcgtggatcgcccattaacgcgcacggcatatcatcggcaattgccgttgccaggcgaatcgggcgacctttcacccgtccgctcattaattgcagggtactttccagcagcgggcgcggttcaaagggctcatcgctgacgctaacattcttgccacctgcttcgatagcggaataatcgagaatatcgttgaggatggtcagcaagctttcaccagagtcagtaattgcccgcaaatcatcacgctgggcgttaagtgcggggttatctgccagcagttgagcagtgccgagaataccgtacagcggtgtgcggatctcatggctcatcgccgccagaaacgcgctttttgcctggctggctttttctgcttccgcccgtgcctgtcggtgttctatcaccagttcctgcaattcagctgtacgcgctttgacctgcgccgccagctgttcgcggtggcgattcagtgcatgaacattgctgcgaaacgcatccatcagccgcccgatggtatccagctcccgtacgccagcggtttccgggaaaggggagtcaatatcaccgtccagcagccgttgcagcgcctgcgtttgttcggcaagtggacgcgtgacactgcgataaaccacgcgccagaggatcagaatcagtgcgcaaagactaaccatccccagcaataacaggctgtattgcccgcgtgcactcgctttttccagatgcgccagtccgtgctgattacgcagctcaatggtgtcgaccagctgactgacttcgctactaaactgcgcgaactgggcgatgttattttgtgcgagagtttgtaggtgattgctgatttcactgtcctgctgatacagcgccagcaaatcgctatattggctaacggtagttaacgttgttgcgacctgcgcacgaacacccggatcttcaatgcgtatttgccgacgttgcagaattttcaccgcattattgagctgcttttccagcgttggtgcatttttctggatctgctccagccccagattcatcaccatttgctgcacccgcagagcgctaaggcgcagttcattcatctggttaacatactcaagatcgatatcaatcagccgatcgagtgcactttcagcagcctgacgctgatcttgttcgatcaaatcgtaaatcccggcctgggtcgctccagcggaagttgtcgcattattcgcctgaccttgcgccaggcgtgcgatctcatcggcggcagcgactatctgctgactgagttgctgttgttgctggcgcagttgcaaacgctgccccaccagttccccttgctgacgtaagctacgggagatctcctgctcctgttgttcaatagcggtggtatcaaaaccttgttcccgtaacgcttgcagcaacgcattaatcttcaggctttgtgcggtgagcattcgcccctgcgcctgccacatcttttcgttatcggcactggtcaggttctgcgcggcgaaaagttcccaggcgctggcttcgctcaactggcgcgccatattcatggtaggaatcaatgcctgagtgttgtctttttccacctggctgataaagcgcaggttgtaccatcccaccagggtactggtcagggttaacagcgccatcagggcaaagcccatccagagtcttcgggtcagggttaaattcacggtcggtgcactttaggtgaaaaaggttgagtcgcaaagcggaatgcatctagcataaagccttattattgatgaggctatcatgcgcgtactgctatttttacttctttcccttttcatgttgccggcatttagcgctgataacctgttgcgctggcatgatgcgcagcatttcacggtgcaagcctctacgccgcttaaagccaaacgcgcatggaaactgtgcgcgctttatcccagcctgaaagatagttattggttaagcttgaactatggtatgcaggaggctgctcgccgctacggtgtggatttaaaagtgctggaggcaggcggctacagccagttggctacccagcaagcacaaatcgaccagtgtaaacagtggggcgcagaggccattttgctcggtagtagcacgaccagttttcccgacctgcaaaagcaggtagcaagtctgccggtgatcgaactggtaaatgctattgatgctccccaggtgaaaagccgcgttggtgtgccctggtttcagatgggctatcaaccggggcgatatctggtgcaatgggcgcacggtaaaccactgaatgtgctgttgatgcccggacccgataacgccgggggcagtaaggagatggtcgagggttttcgcgcagccattgccggaagcccggtgcgtattgttgatattgcgcttggtgataacgatattgaaatccagcgtaacctgttgcaggagatgctggaacgccatccagaaatcgacgtcgttgccggaacggccattgcggcagaggcggcaatgggggaagggcgtaacctgaaaacgccgcttaccgtggtgagcttttatcttagtcatcaggtgtatcgcgggctgaagcggggaagagtgattatggctgccagcgatcaaatggtctggcagggggaactggcggttgagcaggccatcaggcaattacaggggcaaagcgtttctgataatgtcagcccaccgattttagttctgacgccgaaaaatgccgaccgtgaacatattcgccgcagcctgagtccagggggatttcgtccggtctatttttatcagcacacaagtgcggctaagaaataatcagcacacatcagcggctaagaaataaccttcaccatgttgcgtcaccagtaaatccgcgctgagtttatgacgtaaacgacgaattaacacatcgacggtgcgcaggtcagggttttccacccgacgcgcagaaagcatacgtagcagacgttcacggctgagaatttcgcccggattcgtcacaaatgccaccaacatttcatactctgcgcgggtcagtttaatcggctcgccatcccgctccagcgtatggcggctcacattcaggcaataaccggcaaagcgatagcagttgtcctgagtgtgcggttgagcttgtcgcgcgaggtcgattcgccagagcagatttttcacccgtactaccagttcgcgcagttccagcggtttggtgacgtaatcgtctgcgcccatttccagcccaacaatacggtcaatccgatcgctgcgtccggtaaccagaataatccccaccgtactgcgttctcgcagggcgcgggttaacatcaggccattttcatcgggtaagttgatatccagcagaattaaatctacgctctgattctgcataatttcccgtagcccagcaccgctcgccgtaacggaaacggtatacccctcctgagtgaagtaggattgtaatcgcgcctgggtaaccggctcatcttcaacaataacaatgtgatgtggcatcagagggttttactcattctgttcatatctgttcatattctgccgtaagccgttcatcctgaccagtgccgctgttcatatttgctcattaagatcgcttcactaaaccataattctacaggggttattatgcggaaactctggaacgcgctacgccgacccagtgctcgttggagcgtactggcgctggtcgcaattgggattgtgattggcattgcgctgattgtattgccacacgttgggatcaaagtcaccagcacaaccgaattttgtgtcagttgccacagtatgcaaccggtgtatgaagaatataaacagagcgtgcatttccagaacgcctccggcgtgcgagctgaatgccatgactgtcatatcccgccggatattccaggcatggtgaagcgcaaactggaagcgagcaatgatatctaccagacctttattgctcactccattgatacacctgaaaaattcgaagccaaacgcgcggaacttgccgagcgtgaatgggcgcgaatgaaagaaaacaacagcgcaacctgccgctcctgccataactacgatgcgatggatcatgcgaagcagcatcctgaagcagcacgtcagatgaaggtggcagcgaaagataatcaatcctgcatcgactgtcataaaggtattgcccaccagttaccggatatgagtagcggcttccgtaagcagttcgatgagctgcgcgccagtgctaatgacagtggtgacacgctgtactctattgatattaagccaatttatgcggcgaaaggcgataaagaagcctctggttctctgctgcctgctagcgaagtgaaagtccttaaacgtgacggcgactggctgcaaattgaaattaccggctggacggaaagcgccggacgtcagcgtgtactcacccaattcccaggtaaacgcatctttgttgccagcattcgtggtgatgtgcagcagcaggtaaaaacgctggagaaaaccaccgttgccgacaccaataccgagtggagcaagttgcaggccactgcgtggatgaagaaaggcgacatggtgaacgatatcaaaccgatctgggcttatgcggatagcttgtacaacggcacctgtaaccagtgccacggcgcaccggaaatcgcccactttgacgctaacggttggatcggcacgctcaacggcatgattggctttaccagtctcgataaacgtgaagaacgcaccttgttgaaatatctgcaaatgaatgcgtctgacaccgcaggtaaggctcacggcgataagaaggaagaaaaataatgaacaataacgatctctttcaggcaagtcgtcggcgttttctggcacaactcggcggcttaaccgtcgccgggatgctggggccgagtttgttaacgccgcgacgtgcgactgcggcgcaagcggcgactgacgctgtcatcagcaaagagggcattcttaccgggagccactggggggctatccgcgcgacggtgaaggatggtcgctttgtggcggcaaaaccgttcgaactggataaatatccgagcaaaatgattgccggattgccggatcacgtacacaacgcggcgcgtattcgttatccgatggtacgcgtggactggctgcgtaagcgccatctcagcgatacctcccagcgcggtgataaccgttttgtgcgcgtgagctgggatgaagccctcgacatgttctatgaagaactggaacgcgtgcagaaaactcacgggccgagtgccttgctgaccgccagtggttggcaaagcacggggatgttccataacgctagcgggatgctggcgaaagctattgccttgcatggtaatagcgttggtacgggcggagattactctaccggtgctgcgcaggtgatcctgccgcgcgtagtcggtagcatggaagtgtatgaacagcaaacctcctggccgctggtattgcagaacagcaaaaccattgtgctgtggggctccgatttgctgaaaaaccagcaagcgaactggtggtgcccggatcacgatgtttatgaatattacgcgcagctaaaagcgaaagtcgccgccggtgaaattgaggtcatcagcatcgatccggttgtcacatccacccatgagtatctggggcgcgagcatgtgaagcacattgcggttaacccgcaaactgacgtgccgctgcaactggcgctggcacatacgctgtacagtgaaaacctgtacgacaaaaacttccttgctaactactgtgtgggttttgagcagttcctgccgtatctgctgggtgagaaagacggtcagccgaaagatgccgcatgggctgaaaaactgaccggcattgatgccgaaaccattcgtgggctggcgcggcagatggcggcgaacagaacgcaaattattgctggctggtgcgtgcagcgtatgcagcacggtgaacagtgggcgtggatgattgtggttctggcggcgatgctggggcaaattggcctgccaggtggtggttttggttttggctggcactacaacggcgcaggcacgccggggcgtaaaggcgttattctgagtggtttctccggctctacgagcattccgcctgttcacgacaacagtgactacaaaggctacagcagcactattccgattgcccgttttatcgatgcgatcctcgaaccggggaaagtgatcaactggaacggtaaaagcgtaaaactgccgccgctgaaaatgtgtatttttgccggaactaacccattccatcgccatcagcagatcaaccgcattattgaaggcttgcgcaagctggaaacggttatcgccatagataaccagtggaccagtacctgccgctttgccgatatcgtactgcctgcgaccacgcagtttgagcgtaacgatctcgaccagtacggcaatcactccaaccgtggcattatcgccatgaaacaggtggtgccgccgcagttcgaggcgcgcaacgacttcgatattttccgcgagctgtgccgtcgctttaatcgcgaagaagcctttaccgaagggctggacgaaatgggctggctgaaacgcatctggcaggaaggtgtacagcaaggcaaaggacgcggcgttcatctgccagcgtttgatgacttctggaataacaaagagtacgtcgagtttgaccatccgcagatgtttgttcgccaccaggcattccgcgaagatccggatctcgaaccgctgggcacgccgagtggcctgattgagatctacagcaaaactatcgccgatatgaactacgacgattgtcaggggcatccgatgtggtttgagaaaatcgaacgctcccacggtgggcctggcagccaaaagtatccgttgcatctgcaatctgtgcatccggatttccgacttcacagccagttatgtgagagcgaaacgctgcgtcagcaatatacggtagcgggtaaagagccagtattcattaacccgcaggatgccagcgcgcgcggtattcgtaacggtgatgtggtacgcgtctttaacgctcgcggtcaggtgttggcaggggcagtggtttctgaccgctatgcacccggcgtggcacgaattcacgaaggggcatggtacgatccagataaaggcggcgagcctggtgcgctgtgcaaatacggtaaccccaacgtgttgaccatcgacatcggtacaagccagctggcgcaggcgaccagtgcgcacactacgctggtggaaattgagaagtacaacggaacagtggagcaggtgacggcgtttaacggccccgtggagatggtggcgcagtgcgaatatgttcccgcgagccaggtgaaaagttgaattaacccgcgtcgcaggtgaaatcatgaccacgctgacagcacaacagattgcctgtgtttacgcctggctagcgcagttgttctcccgtgagctggacgatgaacaactgacgcaaatcgccagtgcgcagatggctgaatggtttagcttgctgaaaagcgaaccgccgctcactgcggcggtgaacgagctggaaaaccgtattgccacgctgacagtacgtgacgatgcccgtctggaactggccgcggacttttgcggcctgtttctgatgaccgacaaacaagcggcgctgccgtatgcaagcgcctacaaacaggacgagcaagagattaaacgcttgttagttgaggcagggatggaaaccagcggcaatttcaacgaaccggcagatcatctggcgatctatctcgaattgctcagccatctgcattttagcctgggagaggggaccgttcctgcgcgaagaatcgacagtttgcggcaaaaaacactgacggcgctgtggcaatggttaccagagtttgttgcgcgttgtcgtcagtatgacagctttggtttttacgcggcactaagccagttattgctggtgttagtggagtgcgaccaccaaaacagataacgtcgtttgtgcgcctgaaaagacgcgtttagcgtcgcatcaggcattatggcgcagttgccggatgcggcgtgaacgtcttatccggcccacaggaactgtaatctttgtagaccggttaagatgcgtcatcgcatccggcaaacacacatcacggatgagctacaaaccgggaaagccgctggcgcagcaggcggttttcctgcttcaggtgcgcaatatcatccattaacgtcagcgccaccgcgatccccggccagtccagagccagttcatgacgcaggcgtaccgcgcgttgcaccacaatggcggcatggtcgtcaaatacccaggttgtttcctggatctcacgcggttcaaccacccccaaaccgacaatttcattcaactcctcttcagagatgccggtatgcaggcaaaattcggtaatagtaaaagtcaccgtaacattagccattatgctttcccccaatctttacgtggatcaaaagagctctgggcgtctgccagttgctgccacagcgcggcagtgttttcatccggtttcggcggcatcacgattttcagtaccgcatacagatcgccggtctgttttttgctcaccagacctttgcctttaacgcgcaatcgttgcccggcctggctgcctggcgggatagtcagcaaaatgctttctttcagtgttggaacggtgactttagcacccagcgccgcttcccacgggctaaccggcaccacaatttccagatcctggccgacaatatcaaacagcggatgtggcgcaatatgaatcaccagccacaaatcgccatttggaccgccgttttcgcccggcgtcccctggcctttcagacggatgcgttgaccattgccgacgcccgccgggatcttcacattcagcgttttcggaatttcctgttcgatcatgccaaaggcgttataaaccggcaggttatagctgatggtacgcttatgctcagtaagcgtttcttcgaggaataccgccacttcgatttcaatatcgtggccgcgtgtggcggggcgttgacggctctggcgggcatgctgaccgaaaatactgctgaagatatcgtcaaaatcttcggcgttaaaactctgaccgtcgccatggtggaactgacggttaaattgcggatcgttgcgatgttgccacatctgatcatactcagcgcgacgttgttcatcacttaacacttcccaggcttcagcgacctctttgaagcgggcttcggcatccggttctttgctgacatcaggatggtatttgcgggcaagtcgacgataggcggtcttgattgtcttgagatcgtccgtcggtttcacgcccatgatggcgtaataatcctttaattccatagcgttatctcgcgtaaatcaacacaaattgaaggaacccctgtaaggtaactcctataagtgtagggtaatcctcaaaatttcatatgccaacacagaatatgttattgaaatcatcgcggagaggaggtcgccatcaagatgggttgctgaacatattttaaacaggtgaaaaagggtgagcgatttttgatagttgaaccaggcactttaagtttaactagggcgtcattatttattaaattttatagacgctatatatgggtagtaatatacatggaattagttgcactgcaaataattatttgaaacaggcctggaacgatataaaaaatgagtacgaaaaaaatcaaacatatagtatcacgctttttgaaaacacactggtgtgttttatgcggttatacaatgaactcagacgtaaagtaaatgaagaggatactccatgtctggaatgtgaaagtctagaaaaagaatttgaggaaatgcagaatgataatgatctaagtttatttatgagaatattgcgtactaatgatacacaaatttatagtggggttagtggaggtattacatatactatacaatatgttcgagatattgatattgttagagtgtccttgccgggcagagctagtgagtctatcacagattttaaaggttattattggtataactttatggagtatattgaaaacattaatgcgtgtgatgatgttttttctgagtattgttttgatgatgaaaatataagtgtccagccagagcggataaatacgccgggaatatctgatttggattctgacattgatttgtctggtatatcttttattcagcgtgaaactaaccaggcattaggattaaaatatgctcctgtagatggcgatggatattgtctgttaagagctatactggttttaaaacaacatgattatagttgggcgctggtcagttataagatgcaaaaggaagtttacaacgaattcattaaaatggttgataaaaaaacgatcgaggctcttgttgatacggcattctataatctcagggaagatgtaaagacgttatttggcgttgatctacaatctgacaaccaaattcaggggcagagtagtcttatgagttggagctttctgttttttaaaaaacaattcattgatagttgcttgaataacgaaaaatgtatcctgcatttacccgagtttatatttaatgataacaagaacttgcttgctttagataccgacacgagcgataggattaaagcggtgaagaattttcttgttgttcttagtgatagcatttgcagtttatttattgttaatagtaatgtggcaagtatctccttggggaatgaatcctttagtacagatgaagatcttgagtatggttatttaatgaacactggcaatcattatgacgtttacctccctcctgaactttttgctcaggcttacaagttaaacaataaggaaatgaatgcgcaactcgactatttaaatcgttatgcaatttaatggcaaaggcatatgctaaaaaccattgttattagtctcacacttttttattggtaaatattgtctctgtattggtaacgccgcagatattctgtttagccacaggtgcaattatcagcggcgtacgcgaggcaggggctaatcaggcatagtttgcgtcaaaccttgcctgtttttgaagatgtatatagaaaaacaggcgttcaacaagccattttgcgaacctgttcccggaaaaaagtcatatttctgtcacactctttagtgattgataacaaaagaggtgccaggaatgaacaaaacgctaatcgccgcagctgtggcagggatagttttactcgctagtaacgctcaggcacaaaccgtaccggaaggctatcagctacagcaagtgctcatgatgagccgccataacttacgtgcgccgctggcgaacaatggcagtgtgctggagcagagtacgccgaataaatggccagaatgggacgtccccggtgggcaactcaccaccaaaggtggcgtgctcgaagtgtatatgggccattacatgcgtgaatggctggcagagcaggggatggtgaaaagcggggaatgcccgccgccgtacaccgtttatgcctatgccaatagtctgcaacgtaccgttgcgaccgcacagttctttattaccggcgcattcccggggtgtgatattcctgtgcatcaccaggaaaaaatgggcactatggacccaacctttaacccggtgatcaccgatgattccgccgcattcagtgaacaggcggtggcggcaatggagaaagagctcagcaaactccagcttaccgacagctaccagctactggaaaaaatcgttaactataaagattcccctgcctgtaaagagaaacaacagtgtagcctggtggatggcaaaaatacctttagcgccaagtatcaacaagaaccaggtgtttccgggccgctgaaagtcggcaacagcctggtagatgcgtttactttgcaatattacgaaggttttccgatggatcaggtggcctggggagaaatcaaatctgaccagcagtggaaggtgttgagcaagcttaaaaacggctaccaggacagcctgtttaccagtccggaagtggcgcgcaatgttgcgaaaccgctggtcagttatatcgacaaagctctggtcaccgatcgcaccagcgcaccgaaaattacagtgttggttgggcacgactccaacattgcctctctgttaacggcgctggatttcaaaccgtatcagttgcatgaccagaacgaacgcacgccgattggcggcaaaatcgttttccagcgttggcatgacagcaaagccaatcgcgatttgatgaaaattgaatatgtgtatcagagtgcggaacagttacgtaatgccgatgcgttaaccctgcaggcacctgcgcagcgtgtgacgctggaattaagcggttgcccgatagacgctgatggtttctgcccgatggataagtttgatagcgtgttgaatgaagcggtgaaataacagaaaactcccccgcgagaagcgggggagtcgctggttaaacgtttttacgttcgatggtctgttcgccccaaaaaaggctatctttatcggtcttagcaaaggctttgactaacacttcatcactaccttcttcccaaatcttttccgccattttttcgtcgtacccggcgacttcgaaaatggcctcggctatttccgggctcgtattgcgcagagatgcccattcaccgacgtgatgagctttcgcttcttgagttggcatgcgtatcctcctgttgaagattagccgttaagtttaactgccagacctgcgacatattccccttgataacgagcaatagacagttcttcctggctgggctggcgactaccgtcaccgcctgcgatggtggttgcgccgtacggcgtaccgccgcgaacctgactaacgtcaaataattcctgcgctgcgtagccaatagggacaattaccatgccgtgatgcgcaagggtcgtccaggtggatgtgatggtttgttcctgaccgccgccagtaccggtggaactaaagacgctcgccagttttccgtatagtgcgccggaagcccacaggccgcccgtctggtcgaggaaggtacgcatttgaccggacatgttgccaaagcgggtaggtgtaccaaaaataatggcgtcgtaatcggccagttcttgcggggttgcaaccggtgcagtttgcgttttaccgcctgctttttcaaataattgcggcggcatggtttccggtacacgcttaacgacaacttcagcgccatccactttgcttgcaccctcagcgactgcgcgtgccatcgtttcaatatgtccgtacatggaataataaagcaccagaactttagccatttctaaccactcctcgtgttatctctattccgtagcgattcgctaccacttatttaaagataagacgtccttttcagagtgcaaatttcacaaccacttatttgatttataacaactttcacaagcacgtaattttgtcgcaaaatgacacatttttatctcatcgcgtttttttaatcataagagcggcttatggataattattggagatgatatctattctcgctaagaagctgttgcaggatattaccaaacgcgggtctgcccgcgtcagttcactaagcttagtcccacgtagcgaaaatatggcagccgccatacgccgcgttaattctatgcaatatgatgtctatacccagacggaggtcagtaatggcaaaccatcgaggcggttccggcaattttgcagaagaccgcgaaagagcaagtgaagcaggtaaaaaaggtggacagcacagcgggggtaatttcaagaatgacccgcagcgcgcatctgaagcaggtaaaaaaggtggtaagagcagtcacggcaaaagcgacaactaaccgggctaatcaatgacgaatgcatttttgtctgtagctcgtcaaaaagccatcaccgccggttacccggtggttgatactgatgacaaatgtaagcttgcctgatgcgcgatgcttatcaggcctaccagaagattgcaatatattgaatttgcactgttttgtaggccggataaggcgtttacgccgcatccggcatgaacaatgcgtacgttgtcaacaatctgcaccgccggtaaccccggcggttttctgtttatggctcctgatgaacaacttctggcggtggaacgtcaaccaactttctgcttaacaacgcattgagtaaaatcgcgccaaaggttgctgtaccaatccctcccaacgtaaaaccgcccagcgtgagagcaaaatcacccgcgcccagcactaaggttactgcgaccataatcaaattaccgttctggcttaaatcgacacggttttgtacccatatccttgcgcctgcgacggcaatcagcccgaacacaacaatacttgcaccaccaataaccgcggccggaatggtatgaatcagcgcaccaaatttcggactaaagcccaacagcatggcgatgacggcagcagcaacaaacaccagcgtgctgtagactttggtcacggccatcacaccgatattttcagcataggtggtcacgccgctaccgccgacagagccggaaagcatcgttgccagaccatcgcctacgaatgcccgccccatatacgggtccatattgcgtccggtcatcccggcgactgccttgagatgacctaagttttccgccaccagaatcaccgccacgggcgcaatcagcatcattgcctgaccattaaaagcaggagtggaaaaatgtggcagaccgaaccaggcagcatggctgacgagagtaaaatcgacggcttttcccagccctaaaacgttggtcatcacgccatacagcagacaggcgacaattaatcctacgagaatcaataaccgctggatcatgccacgggtaaacaccgccaccagcccaatacacagcaccgtcattaccgccatccagctatcaaaggcgctagcgcttacacttttcactgcgataggcgctaagttcaggccaatcgccatcaccaccgcacccgtcaccaccggcggcatcagtcgttcaatccagcgcgtaccgattttcatcaccaccaggccaatgacggtataaaccagcccacaggcgataatcccgcccagcgcaatgctgatattcgggttaatgccctgaccgttaaagcccgtcgcggcgatcaccacgccgacaaaagccgcgctggagccgagataactggggacgcgcccgccggtaataaagaaaaacagtaacgtgccgatcccgctcattaaaatggaaagattgggatccagccccatcagaatcggcattaacaccgtcgcgccaaacatcgccaccgcgtgttgaacgcccattactgccgtctgagcaaacggcaatcgttcatccggcgcgaccacgccgctctctgtagaggtgctttttaactgccagtgaggaaaaccgaacattgccatcagctgtctccttaaggaggttaacaagcagggcgcatcagcgcgtgataactgcgatcgaaccacaccagcccgtagggtgtggtgtgacgatgaatcgcttcgatggcgcaaaacagaatgtcgtgggtgccgacgctcaccacctggctgatacggcagtcaaagctaaccagagcctcttccagttgcgggcatccggtcacccccgtctgccagcgggcggcggcaaagcggtgttccatgggcgttttgccgccaaaaaggttactaagcggctcctgcccggcgctaagtgtatttacacacagcgttcgattttcattgaatgccggccagacggacgccccacgattcaggcacaccagtaatgtgggcggcgtatcggtcacactgcagacggcgctggcggtgaacccggcgcgcccggctggaccgtccgtggtgataatattgaccgccgcgcccatgcaggacatcgcatcgcgaaaagtttgttgatcgacaatgttcatagtttgctccttacaacagcccgcaggcttcttcaaaggacagacgtggcaggcgcgcataaagcttgctgctatcgccatagccgatattaatcagcagattgctcttcagcgtgctgcccgtaaaaaaggcgtcgtccacgtgttgacggtcaaagccgctcatcgggccggtatccagtcccagcgcccggcaggcgacgatcagataggccgcctgcatggaactgttgcgaaacgctgtttcttcggcaagttgtgggctggaggtaaaccaactgcgggcatcaccgtggggaaacagtagtggtaaccgttcataaaattcactgtcccaggcgacgatagcggtgacgggcgcggtcagggttttttgcagattgccgctggaaagtgccgggcgcagacgttcttttccttctgccgtgcgggtaaacacgatccgtgccggagaacagttagcacttgtcggcccccatttcatcagggcataaatctcccgtaacgtctcatcgctgacgggtgtctcccgccagccgttgtgagtgcgggcatcggtgaacagggtgctaagcgcacctgggctaacggcttcgttcatagcaattccttacagggcggcttcacggtgatgtaacaggctggcaagcccgttgagtaacagagcattaaacgtttcgggatcggtcacgttgcaggcgtgtccgccatagggcatcaccattttctggctatcgggcagggcggcatgaagttcactggaacatgctgttggcaccagcagatcatcactggcgcagatgatttgcaccgggcagcggatgcgatccgcatggtgactaaagtcagcgcgtttgagggcgttaagtcgacgcagtaaattatttttgccctgaaaatgcgccagtgccagcgcgtcttctgcctccaggcgaggtgcgcgggccgccatccagtcggcgggatagaggaacaacggctgcgcttccacccatgcctgcgcgccgccgctatacagtaatcgttcgcgaacctgaaaacagcggcgcgtatgggcgtttattcgtagccagccgttaacgctgatcagcacagttacgctcgcgggataatccagcgccagctgcattcccaccagcgcaccgagcgcatggccgaccactgcgtaatgctcaatccctgcggctaccagcgcctgatgcagttccgctgccatctgggcgatactgtaatcttctgccagcgtgtcgggattattgccggtgccgcgctggtcgtaacagactacctgatactcctgctccagcaccgccagttgcggtaaccagtaactgccgctacccccaagaccgctaatcaacaccactacgggcgcatcagcataagggggaggactgagactaagtttcatcgcggcctcacttggcgatatgcgcaattgtggcgatttccaccagcgcgtcaggttttaccagtccgcactgaatgcagaatcgcgccggtttatcacccggaaaaaactcggcgtagatttcgttaatcgcggcgtaatttttccagtcggtaataaagatgctgttgaaggtcacatccgccatcgtgccacccgccgtctcgatcaccttgcggatagtttccagaacgtggcgggtttgcgcctttgggtcatcggcaaacagcacgttattatgttgatcaaaagccagcgtaccggagacatacaccacgccatcagccagcgtgccgggaacgaagggggccagcggtgcgctgctgccagcgggaataattacggattttggcatcgttaaactccttaagcgatatgagcaaaggacgtgggagaaagcgcgtcgcagaatgtttcgacgtcgctgacccagccaaaaaaggtttcgatattgaacaacgcggctttctgcgcaaatttcggccccgcctggtgagttgcgtcttcaagcaccacgccgaaatactccagaaaaaagccgtcgcgtagcgtgctttcgacgcagacgttggtagcgatgccggtgaaaaccagatggcgtattccgcggctgcgcaaaatgctgtccagcggcgtattgaagaaaccgctgtagcgcggcttcggcagcacaatatcgccaggctgcggcaccagttcatccaccagttgataatcccaggagcctttcgccagcaatttcccctgcagctgcggctgcttacgcatggttttcagggcgttgcttttatgaaaattcggactgccgggtccgccagcctcgacatactgttcatcccagccattttgaaaccagatgatcagcatccctgccgctcgcgctgcggtcacggcggtttgaatgttggcaatgaccgggcgagtggtactgacatcaaacccggcgagatctaagtagccgcctggcgtggcataagcgttttgcatatccaccacgatcagcgcactttgctgcggatcgaaggtaatggcttccggtcgagcggttaaggtcgtcatcatgccacctcctgagtcagcgcaggtagatgggcgcggcattgcatcagtggttgaatgcgctcgccgaaggtttcgattccgctcagaaaatcgtcgaaggttaacagcacgccttcggcaccaggcacgcttgcgacttcatctaacatgcgcgcgacactggcgtaagaaccgactaacgtccccatattgatgtttaccgcgctagtgggatcggccatctgacgaacgttggtgtcagtaccggagcgggtatctttctgactttgttcggttagccagcttaacgcctcttcatccgcgcccgctttgtagtgttcccatttggcgcgagcggcatcgtcggtttcatcggcaatcaccataaacaacacataagagccaacgtcgcgtccggtttgctctgcggcctgtttcatccgcgcagcggtcggggcgaaagccgtgggtgtatttacgcctttgccgaaacagaagttgaaatcggcataccgggcggagaacgccatgccagcgtcgctttgcccggcgcagatcactttcatggggacactcggttgcggactcacgcgacaatcattcatggtgaaaaaatcgcctttaaaatcgcttttccccgtgccccacaggtcgcgcagcacctgaacatattcggtgagatagtcgtaacgacgggagaaatagtcatcgccaggccagatacccatctgctcatactcgggcttttgccagccagtcacgaggttgacgccaaaacgcccgccagagatggagtcgatggttgcggccatacgggcgacgattgccggaggtaacgttaaggtggcagcagtggcgtaaatctgaatgcggctggtcacggccgccagccccgccatcaaggtgaagctctcaaggttgtgatcccagaactcagttttgccgccaaagccacgcagtttgatcatgctcagggcgaaatcgaaatggtagtgctccgctttttgcacaatggctttattcagttcaaaggtcggcatgtactgcggcgcgtgggtgctaatgagccagccgttgttgccaataggtacgaatacgccaattttcatcatcaacctctcttcgtctcgtaaagtgaaagtcagacggggcgctgcatcctgcatatccttttcagccgcgtattggcttgtttgcaaagcggatgccagtttttaaaaagttaatgttattaatctgttaacattacgttatctaaaatatctggtaaaaagtggactaaacggtcaaaacagttgcacataaaacatgcatctgtgcgcgatgagagtgcagaaggtcgaggccgggcgggggttttgctatcctgttgccaatctacaagaggggagagcgcatgacgcaaggcgcagtgaaaacaacgggtaaacgtagccgcgcagtaagcgcgaagaaaaaagcgattcttagcgcagcactggacacttttagtcaattcggttttcacggcacaaggctggagcagatcgcagagttggcgggtgttagtaaaaccaatctgctgtattactttccgagtaaagaggcgctgtatattgccgtgctgcggcagattctcgatatctggctggcaccgttaaaagcgtttcgtgaagatttcgccccgctggcggcgatcaaagagtacatccgtctgaagctggaagtcagtcgcgattatccgcaggctagtcgcctgttctgtatggagatgctggcaggcgcgccgctgttaatggatgaactgacgggcgatttgaaggcattaattgatgagaaaagcgcgctgattgccggttgggtcaaaagcggcaaactcgcgccgattgatccgcagcatttgatttttatgatttgggcttccactcaacattacgccgatttcgcccctcaggtggaggcggtgacaggcgcgacgttgcgcgatgaggtatttttcaatcaaacggttgaaaacgtgcagcggattattattgaggggattcgaccacgttaaagatgccggaggaggttgtaacatcctccggctacctgtttaacctatagtcattaagctggcgttaccgccagcggcagcggtattcacactcaggctacgctcgatatacagccgttccagaaggatattgctttcgccacgggcaaaaccctgcacgctaacaattgtgccatcccgcgcggcaactgcttcacacaatgcgcgaagctgatcgctatcaccgtggaagatcaccgcatcaaacggttgagcggttatattttccgctttcgccagttgaatacgttcgctgactgcgcttggcaatgccttcactaactgacgatgcagcgcgtcatccggccacagtacctggctgcccaccgccagcacggcggcgagctgagtcagcgcatcctgctcatcatcggcaatacacaacacgcgctcacgcggcagcagcgtccaggtgttgcgttcacccgtcggccccggcagcaatcgttgtgttcctgcctgcgccagctcgccatattgcgtacataacgcctgcaattctggacgatttgctgcccattcccgcagtgcatttagcggctgagtcaatgcggctttcaactgcgcatcgaccggatactttgcatcctgacgcgcgagcgtcactgccagcgcactttccgggcgattcgccagcagacggtagagatagagcggaccgcctgctttcggcccggtaccggacaacccttcgccgccgaacggctgcacaccaaccactgcgcccaccatattacggttaacatacaggttaccaacatgggcgctgccagtgacctgggcgatggtttcatcaatgcgcgtatggacgccaagcgtcagaccataaccggaagcgttaatctgctcgatcagctctggtagctggttacggttgtaacgcaccacatgcagcaccggaccaaagacctctttttgcaattcggcaaagtcatccagttcgatcagcgtcggggcgacaaaggtgccgctttgccattcacgggcatcttcgctgttttcccgcaccgcctggaacaccggacggcctttgctacgcatggtctgaatatggcgctcaatattggctttcgcttcgctatcaatcactggaccgatatcggtggtcaggcgacccggattacccatccggcattcggccattgcgccgcgcagcattttcaacgtgtggtcggcaatctcatcttgcaggcacagcacgcgcagcgcgctacaacgctgacccgcactgtcgaacgcgctggccagtacatccacgacgacctgttcggtcagtgcactagaatcgacaatcatcgcgttcatgccgccggtttcagcgatgagcggaatagggcgaccctgagcgtccaggcggctggcgatattgcgctgcagtaacgtagcgacttcggtactaccggtaaacatcaccccgcgcacgcgatcatcacccgtcagttgcgcgcccacggtttcaccccgacctggcagcaattgcaccacgcctggcggtacacccgcttccagcaaaatggcgatcccttgcgcggcaatcagcggcgtttgttctgccggttttgccagcacgctgttacctgccgccagtgcggcggcgatctgcccggtgaaaatagccagcgggaagttccacggactgatacacaccacaggccctaatggacggtgggtttcgttagcgaaatcatcccgcacctgtccggcgtagtagtggagaaaatcgaccgcttcgcgcacttcggcaatggcgttactgaaggtttttccggcctcacgcaccagaataccaatcagttgctgcatctggctttccatcagcacggcagcgcggtgcaaaatcgctgcgcgttcagccggaggcgtggcaaaccagattggcgcgttattaaccgcactttccagcgcctgttctacttcacgcggcgtggcttcacgcacatagcccacaatatctttcggttccgcagggttaataacggggctcatctcacctgccgctaccggttgttccagcattggcaaggcctgccatttttgcagtgcactattgagcagggcagaggagaggctggccaggcggtgttcgttagcgagatccagccctgcgctgttgtcgcgcccgtgaccgtaaagatcgcgcggcaggggaattttcggatgcggtaatccagtttgcccttcctgttgcgccagtttttctacagcagtgaccggatcggcgaccagttcatccagtggcaaagaggtgtcggcaatacggttaacaaagctggtgttagcaccgttttccagcaggcgacgcaccagatacgccaacagcgtttcatgtgtgccaaccggagcataaatacgacacggacggttaagtttgccgtcggcaactttcccggggacctgctcatacagtggctcgcccataccatgcaggcactggaactcgtactgacccgggtagtagttctgccccgccagttgataaatcgccgccagcgtatgggcgttgtgcgtcgcgaactgcgggtagattagattcggcaccgccagcagctttttcgcacaggcgagataagaaacgtcggtatacaccttgcgggtataaaccggataaccttcaaggccgtccatctgcgcacgcttaatttcactatcccagtacgcgcctttcaccaggcgaatcatcagacggcgacggctgcgggtggcgagatcaatcaggtaatcgatcaccaacgggcagcgtttttgataagcctgaataacaaaaccgatgccgttccagcctgccagttccggctcgaaacagagtttttccagcagatcgagggagatctccaggcgatcggactcttcggcgtcaatgttgataccaatatcgtactgacgcgccagcagggtgagacttttcagacgcgggtaaagctcttccattacccggtcatactgggcgcggctataacgcggatgcagcgcgctcagtttgatactaatgcccggcccttcatagatgccacgaccgttagacgctttaccgatggcgtgaatcgcctgctgataggaaaccatatacgcctgtgcatctgcggcggtcagcgcggcttcgcccagcatatcgtaagagtaacggaaacctttctcttccagcttgcgggcattggctaacgcttccgcgatggtttcgccagtgacgaactgctcacccatcaggcgcatcgccatatccacacctttgcggatcagcggttcaccgcttttaccgataatgcggttcaggctgcgggagaggctggcttcgttatgggtggaaaccagtttgccagtaaacagcagcccccaggtggcggcattaacaaacagactcgggctacgaccaatgtgactctgccagttaccgttgctgattttgtcgcgaattaacgcgtcgcgggtggctttgtcgggaatacgcaacaacgcttccgccagacacatcagcgccacgccttcctggctactcaggctaaactcctgcaataacccctggaccatacctgcgcgaccactggcatttttttgattacgcagtttatcggccagctgatacgccagtttgtgcgcctgttcagcaactggctgcggcaggcgggcttgttccagcagcatagaaaccgcttcggtttccgggcggcgataggccgcggtgatcgcggcgcgggaaacgctctggggcaatatttgctcggcaaagtcgaggaatggctggtgtggttcctctgccggagtcggtgcttcatcgctctcattggccgcgccagaaagcagcgcaggtagctccggcagagtatcgctgttttccagttgttcgagataagaaaaaatcgcctgcttaattaaccagtgtggtgtgcgatcgatacgtgtcgcggcagacttaatacgctcacgcgtcgcgtcgtccagcttaacccccatggtggtggttcccatgccattactcctgttgttcagaaaggtgcaacttaacgttatcgtgaaatatccatgatgttgcaactttgtgcaaccatgttaaatgtgacatgcgtagcaagcttaaaaatgaatgaaatgttaataaaagaaatcgatatgacagggattaaaaaaataactcagactttttctctgcggcagttaacatttttgaaaggtgcaaccgcaaaaaatgtgagagagtgcaacctgatgaaaaatagtgtcgctgagcactaaaatttaatgtaaatggtgtgttaaatcgattgtgaataaccagcgcttccggcaggatacggtcgccctggtaaaacataaactctgttaccccgttccggtggcagatataacggcaagtttcgacattgccgataataattttttggagactttagatggctattagcacaccgatgttggtgacattttgtgtctatatctttggcatgatattgattgggtttatcgcctggcgaagtacgaaaaactttgacgactatattctgggcggtcgtagtcttgggccattcgtgacggcattaagcgcgggtgcgagcgatatgagcggctggctgttaatggggttgccgggcgctgtttttctttccgggatttccgaaagctggatcgccattggcctgacattaggcgcgtggattaactggaagctggtggccgggcggttgcgtgtgcataccgaatacaacaataacgccttaacactgccggattatttcaccgggcgctttgaagataaaagccgcattttgcgcattatctctgcgctggttattttgctgttcttcaccatttattgcgctagcggcattgtggcaggcgcgcgtctgtttgaaagtacctttggcatgagctacgaaacggctctgtgggcgggcgctgcggcgacgatcctttacacctttattggcggtttcctcgcggtgagctggactgacactgtacaggccagcctgatgatttttgccctgatcctgacgccggttatcgtcattatcagtgtcggtggctttggtgacagcctggaagtgatcaaacaaaagagcatcgaaaacgttgatatgctcaaaggtctgaactttgttgccattatcagtctgatgggttgggggctgggttacttcgggcagccgcacattctggcgcgttttatggcggcggattctcaccacagcattgtccatgcgcgtcgtattagtatgacctggatgatcctctgcctggcaggggcggtggctgtcggcttctttgggattgcttactttaacgatcatccggcgttggctggtgcggtaaatcagaacgccgagcgtgtgtttatcgaactggcgcaaattctgtttaacccgtggattgccgggattctgctgagcgcaattctggcggcggtaatgagtaccttaagttgccagctgctggtgtgctccagtgcgattaccgaagatttgtacaaagcgtttctgcgtaaacatgccagccagaaagagctggtgtgggtagggcgtgtgatggtgctggtggtggcgctggtggcgattgcgctggcggcaaacccggaaaaccgcgtgctgggcttagtgagctacgcgtgggcaggctttggcgcggcgtttggtccagtggtgctgttcagcgtgatgtggagtcgcatgacgcgtaacggtgcgctggcggggatgatcatcggtgcgctgacggttatcgtctggaaacagttcggctggctgggactgtacgaaattattccgggctttatcttcggcagtattgggattgtagtgtttagtttgctgggtaaagcgccgagtgcggcgatgcaaaaacgctttgccgaggccgatgcgcactatcatagcgctccgccgagtcggttgcaggaaagctaagggacttagcctgcggcggttttgtttggcttcagcagcgggttgcgctcccttaatgtgcctcgccatataaattgaatggtgcagggagcgcgcagggggcggccaatcgccgccgccccctgctgtcccggccttcggggaacgcttcagcgattttgacgccaccaacacccgagctgttattatgttccgggcaaaaagttagatttgataatcgcggatggacgaaattgcttgatacacccgcttatcagttttacatggaagctctgatgcattgagtctggacagttttgtcggctggatacggcgtttacgcggcatccggcaagaacacatggttctttgcaaacaatcccatctttctaccctggaataatcgtttatatcccttggcattacctctctttgtttacattccaacatcattttataaacattccgcttgtgtttttctttgccgtaatgataatcgctatcactgcgatttacttttctttgcatagattgactcagaaaaacgtttaagggtgggtggcatgtttgttccgtttctcattatgttgcgcgaaggacttgaagccgcgctgattgtcagtttgattgccagctatcttaagcgtacccagcgaggccgatggattgtgtgatgtggattggcgtgttgcttgccgctgcgttgtgcctgggcttgggtatcttcattaacgaaaccaccggcgaatttccgcaaaaagaacaggaactgtttgaaggtatcgtggcggtgatcgccgtggtgatccttacctggatggttttctggatgcgcaaagtgtcgcgcaacgtcaaagtgcaactggaacaggcagtcgatagcgcattgcagcgtggaaatcatcatggctgggcgctggtgatgatggtcttttttgccgttgcaagggaagggctggagtcggtctttttcctgctggcggcatttcaacaagatgtcgggatctggccgccgctgggtgcaatgctcggtcttgctactgccgtggtgctaggcttcctgctctactggggcggtattcgcctcaatcttggtgcattttttaaatggaccagcctgtttattctcttcgtcgccgcagggctggcagctggtgccattcgcgcatttcatgaagccggattgtggaaccactttcaggaaatcgccttcgatatgagtgcggtgctctcaactcactcgctgtttggcacgctgatggaagggatttttggctatcaggaagcgccgagcgtcagcgaagtcgccgtctggtttatttatctcatcccggcgctggtggcatttgctctgccaccacgcgcaggggcgacagcgtctcgctccgcgtaacaaatacgacgcaaactcttgcttagttacaacatactttaaagggatagtctcgtcatgaccattaacttccgccgtaacgcattgcagttgagcgtggctgcgctgttttcttctgcttttatggctaacgccgctgatgtgccgcaggtcaaagtgaccgtgacggataagcagtgcgaaccgatgaccattacggttaacgccgggaaaacacagttcattattcagaaccacagccagaaggcgctggagtgggagatcctcaaaggcgtgatggtggtggaagagcgggaaaatatcgcccctggctttagccagaaaatgacggcgaatttacagcctggcgaatacgatatgacctgcggtctgctgactaacccgaaagggaagttgatcgtcaaaggtgaggcaacggcggatgcggcgcaaagtgatgcgctgttaagtcttggtggtgcaattactgcatataaagcgtatgtcatggcggaaaccacgcagctggtgaccgacaccaaagcctttaccgacgcgattaaagcaggcgatatcgaaaaagcgaaagcactgtatgcaccgacgcgccagcactatgagcgtattgaaccgattgctgaactgttctccgatctggatggcagcattgacgcccgtgaagatgattacgagcaaaaagccgccgacccaaaattcactggtttccaccgtctggaaaaagcattgtttggcgacaacaccaccaaagggatggaacagtacgctgagcagctttataccgatgtggtcgatttgcaaaaacgcatcagtgaactggctttcccacctagtaaagtggtcggcggcgcagccggactgattgaggaagtggcagccagcaaaattagcggtgaagaagatcgctacagccacaccgatctgtgggatttccaggctaacgttgaaggcagccagaaaattgtcgatttgctgcgtccacaactgcaaaaagccaacccggaactgctggcaaaagtcgatgccaactttaaaaaggtcgataccattctggcgaaataccgtactaaagacggttttgaaacctacgacaaattgaccgatgccgaccggaatgcactgaaaggaccgattactgcgctggcggaagatctggcgcaacttcgcggtgtgctgggactggattaagcgttatgcagtataaagatgaaaacggcgtgaatgaaccgagtcgccgacgtttactgaaagtgataggtgcactggcgctggcgggaagttgtccggtcgctcatgcacaaaaaacgcaaagtgcgccgggtacgcttagtccggatgctcgcaatgagaaacagccgttttatggtgagcatcaggcagggatcctgacgccacaacaggccgcaatgatgctggtggcgtttgatgtgcttgccagcgataaagccgatcttgagcggttgtttcgcttgttgactcagcgttttgcttttctgactcagggcggagcagcaccagaaacgccaaatccgcgcctgccaccactcgattccggcattcttggcggctacattgcgcccgataatctcaccatcacgttaagcgtgggtcacagtttgtttgatgagcgctttggccttgcgccacagatgccaaaaaagctgcagaagatgacgcgtttccccaacgacagcctggatgcggcgttatgtcatggtgatgtgttgctacagatttgcgccaacacccaggacacggttatccatgcgctgcgcgatatcatcaaacacacgccggatttgctcagtgtgcgctggaagcgggaagggtttatttccgatcacgcggcgcgtagtaaaggcaaagagacgccgattaatttgctgggtttcaaagacggcactgccaatcccgatagccagaatgataagttgatgcaaaaagtggtgtgggtaacggcagatcagcaggagcctgcgtggacaatcggtggcagctatcaggcagtacgcttgattcagtttcgagtggaattttgggacagaacgccgctgaaagaacagcagacgatttttggccgtgataagcaaaccggtgcgccgctgggaatgcagcatgagcatgatgtgcctgattacgccagcgacccggaagggaaggtgatcgcgctggacagccatatccggctggcgaatccccgcacggcggagagtgagtccagcctgatgctgcgtcgtggctacagttatagtctgggcgtcaccaactccgggcaactggatatggggttgctgtttgtctgctaccaacacgatctggaaaaaggcttcctgacagtacaaaaaaggctcaatggcgaagcgctggaggaatacgttaaacctatcggcggcggttatttttttgcgctgccgggggtgaaggacgcgaacgattatttcggaagcgcgttattgcgggtttaatgtttttaggcggataaggcatttgtgcgcagatgcctgatgcgacgcttgcgcgtcttatcatgcctacaatcagtgcgggtttggtaggctggataaggcgttcacgccgcatccggcgatcgtgcactgatgcctgatgcaaatcctgctgaaagcacacagcttttttcatcactgtcatcactctgtcatctttccagtagaaactaatgtcactgaaatggtgttttatagttaaatataagtaaatatattgttgcaataaatgcgagatctgttgtacttattaagtagcagcggaagttcccggcagtgatagtcagtcactatggagatcgcggatggtaacgtcctgtactggacatgttttagataatcaacgcgccaccactcgcggagttttctcctccggtagtcatctcgtcactttgcattttcaacctcatcctttctttagttgtgttaccgacgccgtaaacggtgcgcgtagccgttttagcgcattttatccaaaagcaaactatggcttacaaggaagccaaccctctgatgttcgtgcgcataatcgcgctgccaacggcgcgtgtgatgaatacaaacaactcaaggtgctctccatgggaagacaaaagcagtgatcaaagctcgtcgcgaggcaaaacgtgtgctgagacgggatagccgcagccataagcagcgtgaagaagaaagcgtcaccagccttgtgcagatgggcggcgtagaagccattggtatggcccgcgacagtcgcgatactagccccatcctcgcgcgaaatgaagcgcaattgcactatctgaaggctattgagagtaagcagctgatattcgccacgggcgaagccgggtgcggaaaaacctggatcagcgcagcaaaagcggcagaggccctgatacataaggatgtcgacaggattatcgtcacccgtccagttctgcaagccgatgaagatcttggcttcttacctggagatatcgcagaaaagtttgctccctattttcgcccggtctacgacgtgctggtccggcgcttaggggcttcctttatgcagtactgcctgcgaccggaaatagggaaggtggaaattgcgccgttcgcctatatgcgtggacgtacctttgaaaatgcagtcgtcattcttgacgaggcgcagaatgtgactgccgcgcaaatgaaaatgtttttaacccgcctcggggagaacgtgacggttatcgtcaacggtgatatcacgcaatgcgatttgcctcgcggcgtgtgctccggattaagtgacgcgctggaacgtttcgaagaagatgaaatggttgggatcgtccggttcggtaaagaggactgcgtacgtagcgcactttgccaacgtacgctgcatgcctacagttaagtgtgttatcggtgcagagcccgggcgaaccgggctttgttttgggtgttcccggtgtgtgcaatatacgaaaaaaaagcccgtactttcgtacgagctcttctttaaatatggcggtgagggggggattgactcgcttcgctcgccctgcgggcagcccgctcactgcgttcacggtctgtccaactggctgtcgccagttgtcgaaccccggtcggggcttctcatccccccggtgtgtgcaatatacgaaaaaaaagcccgtactttcgtacgagctcttctttaaatatggcggtgagggggggattcgaacccccgatacgttgccgtatacacactttccaggcgtgctccttcagccactcggacacctcaccaaattgtcgttcctgtcttgctggaacgggcgctaatttagggaaatcatgacctgaggtcaacaaactttttgaaaaaatcgcgcgtttattcaaacttcaatcaatgtgtggttttaataagcgaaatctgctttttttgccaccgaccacggatttgttatgctggtggcctttgtagatcataacgataagtgcgaataaatttcgcacaacgcttttcgggagtcagtatggatatcatcttttatcacccaacgttcgatacccaatggtggattgaggcactgcgcaaagctattcctcaggcaagagtcagagcatggaaaagcggagataatgactctgctgattatgctttagtctggcatcctcctgttgaaatgctggcagggcgcgatcttaaagcggtgttcgcactcggggccggtgttgattctattttgagcaagctacaggcacaccctgaaatgctgaacccttctgttccactttttcgcctggaagataccggtatgggcgagcaaatgcaggaatatgctgtcagtcaggtgctgcattggtttcgacgttttgacgattatcgcatccagcaaaatagtagccattggcaaccgctgcctgaatatcatcgggaagattttaccatcggcattttgggcgcaggcgtactgggcagtaaagttgctcagagtctgcaaacctggcgctttccgctgcgttgctggagtcgaacccgtaaaagctggcctggcgtgcaaagctttgccggacgggaagaactgtctgcatttctgagccaatgtcgggtattgattaatttgttaccgaatacccctgaaaccgtcggcattattaatcaacaattactcgaaaaattaccggatggcgcgtatctcctcaacctggcgcgtggtgttcatgttgtggaagatgacctgctcgcggcgctggatagcggcaaagttaaaggcgcaatgttggatgtttttaatcgtgaacccttaccgcctgaaagtccgctctggcaacatccacgcgtgacgataacaccacatgtcgccgcgattacccgtcccgctgaagctgtggagtacatttctcgcaccattgcccagctcgaaaaaggggagagggtctgcgggcaagtcgaccgcgcacgcggctactaataaagcatcaggattcctgctatccttggcgggaattgaatacaggagagagttatgtatcccgtcgaccttcatatgcataccgttgccagcacacatgcatatagcacattaagtgattacattgcccaggccaaacaaaagggcattaaactttttgcgatcaccgatcatggcccggatatggaagatgcgccgcatcactggcacttcattaacatgcgtatctggccgcgagtggttgatggggtagggatcctgcgcggcatcgaagctaacattaaaaatgttgatggtgaaattgactgcagcggtaaaatgtttgacagcctggatctaattattgccggttttcatgagccggtttttgcgccacatgataaagcgaccaatacacaagcgatgatcgccactatcgccagcggcaatgtgcatataataagccatcccggaaatcccaaatatgaaatagatgtgaaagccgttgctgaagcagccgcgaaacatcaggtggcgctggaaatcaataattccagttttttacacagtcgtaagggcagtgaagacaactgtcgtgaggtagccgcagcggtacgtgatgctggaggttgggtggcattaggcagcgattctcacaccgcgtttaccatgggggaatttgaagagtgtcttaaaatcctcgacgcggtagattttccgccagagcgcattttgaatgtttctccgcgccgcttactgaacttccttgaatctcgcggtatggcaccgattgcggaatttgcagacctttaattactagtaatggaaatatattaatgaacgagttttctatcctctgtcgtgtgctgggtagcctctattaccgccaaccacaagatcctttactggtgccgctgtttaccctgattcgtgaggggaaactggctgcgaactggccactggagcaggatgagttgctgacacgtttgcagaaaagctgtgatatgacgcaagtctctgccgattacaatgcgttgtttatcggcgatgaatgtgctgtgccgccatatcgtagcgcatgggttgagggcgcgacggaagcggaagtgcgcgcttttctttctgagcgagggatgccattagcggatacgccagccgatcacatcggcacattgctgctcgcagcttcctggctggaagatcagagtacggaagatgagagcgaagcactggaaacactgttcagtgagtatctgttaccctggtgtggtgcgttccttggcaaagtggaggcccatgcaaccacgcctttctggcgcaccatggcaccgctaacccgcgatgccattagtgcaatgtgggacgagctggaagaagattctgaagaataagtgtgatctacgtcactcataactgcaacggataatttgttgttgcataaaatgtgtgctcgatctcattcatggccgcgttttctgctatcatgcgcggcatgaacatacttctctctattgcaatcacaacaggcattctctccggtatctggggatgggtggctgtttccctgggcttactaagctgggcgggcttcctgggctgtacggcctactttgcctgcccgcaaggtgggctgaaagggctggcgatctccgctgcaaccctgcttagtggcgtggtgtgggcgatggtcattatttacggtagtgcactggcaccacatctggaaattctcggttatgtcataaccggtattgtcgcgtttctgatgtgtattcaggccaaacagctgctgcttagttttgttccggggacgtttataggcgcatgcgcgacgtttgccgggcagggtgactggaaactggtgttacctagcctggcgcttgggctgatatttggttacgcaatgaaaaacagtggcctgtggctggcggcgcgtagtgcaaagacggcgcaccgtgagcaggaaatcaaaaataaagcgtgaggggcactcacgctttcgcttaaacagtaaaatgccggatgataattccggcttttttatctgtcaggattccggtggaacgctcatatggcggtatttcaccagaatgtcattctgccgttctgctttattttgcaaatcccacagaccacggtcgataccatcattaatcaggaaaatgacccctgtttcgatagcgctcatcaggcacagcataacaggttcgttgctggtgtaacccacttccccttcaagcaagcgctggtagtcaataaagcggaaaaccccggcctgaacttcataggaaagtatcgtcttactggtgttcacgctagaaaggatctcgccggtactcacattgacgacgcgcaggttcacggcaatctgatcgagctggtattgcgtgtcggcaccgatgccaaaatatcttgccccaaccccgccagatttgacgttgctttcataaccgataatgctaccttcaaccatgatatttgccgccgttaaagattgcagcgggattcggttattaatggcaaccgtgccgttttcttgtgccgcacgaataatcttgcgctcgttaagcaggttttgtaagccctggcgctccagcggtataaaccagcgagaatctttcagtgccgtgaccagcattgccgtggcgctttgcggaacagcagtggagaagttacttgccgggtagggtttaaattgcccggtttcgtcctgaatgttgtatacgctaacaaagattttacccgtcggcgctggcagatgggtcaaatctttgtagctctgagcacgaggcattaatgtcggtctggcggcttctttaggcggggcggttaagcatccgctcagtaacatgacggcaaccaaaagaaataagcgctgcatgattattttccttatgaagctggggcttaaaaatcggtactgttattttgtaaaccgctaacctggatggtgctggtttgtccggttttacgatctgtcacgttcaactgcaattgaccatcgcggttggcaatatcgacaatataatcgttggtcaccatgcggcccggtttaccggtattaatattgctcagtagcccacctaaaatttgactctggatggcctgagtaaagttatctaacgcactgggtgtttcaataccaaagtcatcgttatagctcggatctttataagagttttgggcctgagcgctatttaataaaaaagcgccattatttgggttaccaccaaagtttggattacggaactggaaagtcatggttccagcccaacttaatgggctaataagcatgagtagaactactgcatgtttgacacgcattgcagcctccgaacaattttttatttagaattcatcatgcgccaaatcgcccgtacttaataacgcctgatttatctggcgacgatttagtgcttcttcagtttgaatcagtgcaaagacgacagttttctcgaagtctcttttcaacggaaataaaaaagtctggaaaataacgtcctgattgaccgttatagtgatccagcttccccatcgtgcactgggcctttcattaatcgttaagttacccgtatagtcactttcccatttatcactaaaggctcggtaaaaatcatggccaatagaactaacagtatggtcagttagcaatcccgggacttctacctcaacggcgtgaagattccctgcggcgaacagaaattctgccgccacaatccagcgtaaataacgtttcatggctttatcgcctgaggttatcgtttgcccaggaaaccgcttgtgtccggttttttacggctatcttcttgaaaagattataaagatgcgttttaaccgtattttcgctgatgaacaagctacgagcgatctcgttattagacgcgccgatacgcagcttattcaggatctctttttcccgatgagtaaggagggcactttccgtgctgttataacgatagttaccactatgcgtaatcaggtagctggcaagcttttgcgtaaagtagcattcgccgcgcaggacgccttgcaacccattgacaacacgttcttgatcctccatggaataaaaaacgccgttgatatgaggccagttttcaatgtcgcggtacgggtaatcttcaggcgtatttagcaacaatattttgatattgttgtttttcctgctcaaagtatcctgccaataatggataagctttttatccgcttccatcatatccagaagaataatagagccactagagatatcgtccagagaacgttgaatattatgtaattttcctgtaattgccaggctttgtttaaggtgctgcaagagagctgtcgcctgcaaagaagatttagtgatcaacaataatgtatgaccatgaatactatggacttcattaaacatgatgaaaccccgctttttttattgatcgcacacctgacagctgcctctaaaatagaagcaccagaagtactgacagatgttgcactgctgtgtgtagtaataaatcagccctaaatgggtaaaatataaaactaatggattacatctgatttcaatctagccattacaaatcttaaatcaagtgttaaacatgtaactaaatgtaactcgttatattaaaatgttaaccttaaggttttattaagtttagaaatgatagaaaagttgtacatttggtttttattgcacaattttaaaaaatcatacaaatggtgataacttactaataatgcatataaaaaatatttcggtgtagtcctttcgtcatgtaaaacgttcttgttttttctccacacctccgtggacaattttttactgcaaaaagacgaggtttgtcacggcttgtgcgcaagacatatcgcagcaatcagcgacgggcaagaagaatgactgtctggtgctttttgatagcggaaaacggagatttaaaagaaaacaaaatatttttttgcgtagataacagcgtatttacgtgggttttaatactttggtatgaactaaaaaagaaaaatacaacgcgcgggtgagttattaaaaatatttccgcagacatactttccatcgtaacgcagcgttaacaaaatacaggttgcgttaacaaccaagttgaaatgatttaatttcttaaatgtacgaccaggtccagggtgacaacatgaaaaacaaattgttatttatgatgttaacaatactgggtgcgcctgggattgcagccgcagcaggttatgatttagctaatagtgaatataacttcgcggtaaatgaattgagtaagtctagttttaatcaggcagccataattggtcaagctgggactaataatagtgctcagttacggcagggaggcagtaaacttttggcggttgttgcgcaagaaggtagtagcaaccgggcaaagattgaccagacaggagattataaccttgcatatattgatcaggcgggcagtgccaacgatgccagtattagccaaggtgcttatggtaatactgcgatgattatccagaaaggttctggtaataaagcaaatattacacagtatggtactcaaaaaacggcaattgtagtgcagagacagagccaaatggctattcgcgtgacacaacgttaatttccattcgacttttaaatcaatccgatgggggttttacatgaaacttttaaaagtagcagcaattgcagcaatcgtattctccggtagcgctctggcaggtgttgttcctcagtacggcggcggcggtaaccacggtggtggcggtaataatagcggcccaaattctgagctgaacatttaccagtacggtggcggtaactctgcacttgctctgcaaactgatgcccgtaactctgacttgactattacccagcatggcggcggtaatggtgcagatgttggtcagggcagtgatgacagcagtatcgatctgacccaacgtggcttcggtaacagcgctactcttgatcagtggaacggcaaaaattctgaaatgacggttaaacagttcggtggtggcaacggtgctgcagttgaccagactgcatctaactcctccgtcaacgtgactcaggttggctttggtaacaacgcgaccgctcatcagtactaatacatcatttgtattacagaaacagggcgcaagccctgttttttttcgggagaagaatatgaatacgttattactccttgcggcactttccagtcagataacctttaatacgacccagcaaggggatgtgtataccattattcctgaagtcactcttactcaatcttgtctgtgcagagtacaaatattgtccctgcgcgaaggcagtagtgggcaaagtcagacgaagcaagaaaagacccttagtttgcctgctaatcaacccattgctttgacgaagttgagtttaaatatttccccggacgatcgggtgaaaatagttgttactgtttctgatggacagagtcttcatttaagtcaacaatggccgccctctagtgaaaagtcttaatttgttgaaatatcgagcataagatgaatctggagagaatggtctgctgcgaatcagccaacctgaaagtatggataacacaaccctcaaggatgactaatcattgaggaaatagaataaatgttcagaccttttttaaactctcttatgctcggcagtttgttttttccttttattgccattgctggaagcaccgtgcaagggggcgtgatccatttttatggccaaattgtggaaccggcatgtgacgtcagcacccagagtagtcccgtagaaatgaactgcccacagaatggttctattccgggcaaaacctactccagcaaagcgttaatgagcggcaatgtcaaaaacgcgcaaatagccagtgtaaaagtgcagtatcttgataaacagaaaaagctggctgtaatgaacatcgaatataactaagtttctgaacaactcacgttgctgagcagaaaaatgcgatttaaccaaaaagcctgctgtacacttaagaaacaagaaggtgtaaggaggcgttatgaaaacgcgtattcatgttgtgcagggtgatattaccaaactggccgttgatgtgattgtgaatgcggctaatccgagtttaatgggaggcggcggcgtcgatggggccattcatcgcgcagcgggtccggccctgctggatgcttgtttaaaagtcaggcaacagcagggcgattgccctacggggcatgccgttattacgcttgcaggcgatcttcccgctaaagccgtagtgcacaccgtcgggccagtctggcgtggtggtgaacaaaacgaagaccagcttttgcaggatgcctatctcaatagcctacgactggtggcggcaaacagctatacgagtgtggcttttcctgcaatcagtactggggtttatggttaccctcgtgcggcagcggctgaaatcgcagtaaaaaccgttagtgaatttattacccgtcacgctttacccgaacaggtatactttgtctgttatgatgaagaaaacgcccacctctacgaaagactccttacccaacaaggagatgaatgatttgccccggctggcgagcgcggtgctgccactgtgtagccaacatcccggtcagtgtggcctttttcctctggagaaaagtctggatgcgtttgccgcccggtatcgtctggccgaaatggcagagcatacgctcgatgttcagtattacatctggcaggacgatatgagcggtcggttactgttttccgccctgttagccgcagcaaagcgtggcgttcgcgtccgtttgttgctggacgacaacaatacgcccggacttgacgacattttacgcttgcttgacagtcatccacgcattgaagtccggctttttaatcctttcagctttcgcttgctgcgtccgcttggttatatcaccgacttttcccgtcttaatcgccgtatgcacaataaaagtttcactgtcgatggcgtggtgaccctggtgggaggacgaaatattggtgatgcctattttggagcaggggaggagccactttttagcgatttagatgtcatggcaataggacccgtggtagaggacgttgccgatgatttcgcccgctactggtattgcaaaagcgttagtcccttacagcaggtgctggatgtcccggagggtgaaatggcggatcgcatcgagttacccgcctcctggcataacgatgccatgacgcatcgttatttacgcaaaatggaatccagtccatttataaatcatctggttgatggaacattgccgcttatctgggcgaagacacgtttattaagtgatgatccggcgaaaggggagggcaaggcaaaacggcatagtctgttaccgcagcgcctgttcgatatcatgggcagtcccagtgaacgcatcgatattatctcttcctattttgtaccgacacgcgcaggtgtggcgcaactcttacggatggtgagaaaaggggtaaagattgcgatcctaaccaattctcttgccgctaacgatgttgctgtcgtccatgccggatacgcgcgctggcgcaaaaaattgctccgctatggcgtggaattatatgaactcaagccgacgcgtgaacaaagtagtacgttacacgatcgcggcataaccggtaattccggagccagcctgcatgctaaaacctttagcatcgatggtaaaacggtgtttatcggctctttcaatttcgatccgcgtagtacattgctcaatactgaaatgggcttcgtgatagagagcgaaacgctggcacagttaattgataaacgctttattcagagccagtatgatgcggcctggcagctccgtctggacaggtggggacggatcaactgggttgatcgtcatgcaaagaaagagattattctcaaaaaagaacccgccaccagtttctggaagcgggttatggtcagactggcgagcatattgcccgtggaatggttattgtaaatgtggcttaacgggctggtgctttatcgttctcacgcttaacaaccggtttaccagagaacaaaaacttcagtaacgggatgcgcaaatgaatttcatacagaattatcgcaatccctactacaaatatcaggccacagagaaaaccaagccagttggaggtgatgtgcggtgtaatgtatgcgccgaaaaacagcgttaacgggtggtgaaccagatagataaacaggcttgcgttaacaaaataagtcacccgcgcactctggaagttaagcaaacggtggccaaaggagaagaccacattcaccatccacagaccgaggaccatggtgatcacgctctcggtttcgtacatccaggcatcgccactgccatagcgctggttgagtaaataagcgacaaacgccaatgctgctgcaagggtacagccacgagacggcgtggtaaacaaggctttaagatgagggaaaatgaaagccagtgcgccgaggataaagaacggcaaataaaacagcgtttgcatgacaataaaattgaacatgccattactcagaatgggcggatacacaataaaaatcgttcttcttattaccgcataaccgatgccgaggcataaaaaaatcacgcttagttttaccatgctgaattttttattcgttttatcagaattttctaaattatttctgatgcgcttaaatatccatacgcacagcgtcgtcatgaccactaacaccagtaaaaaccacaggtgacttattaattcccaggccaacgtattatatttgtcatacaaactcagcccaggccaactttccgcttttcctttgacatattgcagcataataaattgcggtaatgtcagtagggggatggctgttaacatcgggatacctacacgttcgacacgtactttccaccattttttcaagggatagcgtaaaaaaagcatgtaggaaaagtagccggatataacgaaaaatacctgcatgcggaagctgtggatgaagtcattaaaaagggtcagccacaaactactttcggcgctattcacatgccatgtatggctgctatagattaaagaaatatgaaaaggtatccctaacaacatcagccaggcgcggatggagtcgaggaaatattcacgttgcgcgggtactgggttcatatatggttaactaatctcggatttttcgtcttatccctgtcgggttatgcctttaggcttgttgccatagtgacaccgacctgaccgcgccaggcgcaggcttcaaggtttttatgcatagcatcatcgctaccactaaccagaatggaagcgtctgtaagacggttgataaataaatttgctggcaaaccctacacgaagtcgatgcttctgtctttaggagaagcacggaaagtgaaaacggttgcaatcaggtgcttaatccatgagccagcgtgctgaacgataccgggattctgttgtcggaatggctggttatccattaaaatagatcggatcgatataagcacacaaagggggaagtgcttactaattatgaaacataaactacaaatgatgaaaatgcgttggttgagtgctgcagtaatgttaaccctgtatacatctagtagctgggctttcagtattgatgatgtcgcaaagcaagctcaatctttagccgggaaaggctacgagacgcccaaaagcaacttgccctccgttttccgcgatatgaaatacgcggactatcagcagatccagtttaatcatgacaaagcgtactggaacaatctgaagaccccattcaaactcgagttctaccatcagggtatgtacttcgataccccggtcaaaataaatgaagtgactgccaccgcagtcaaacgaatcaaatacagcccggattatttcactttcggcgatgttcagcatgacaaagatacggtaaaagaccttggctttgccggttttaaagtgctttacccgatcaacagcaaagataaaaacgatgaaatcgtcagcatgctcggggccagctatttccgcgtgattggtgcaggtcaggtttatggcctttctgcccgcggcctggcaattgataccgccttgccaagcggtgaagaatttccgcgcttcaaagagttctggatcgagcgtccaaaaccgactgataaacgtttaaccatctatgcattgcttgacagcccgcgtgcgacaggtgcttacaaattcgtggttatgccagggcgtgacacggttgtggatgtgcagagcaaaatctatctgcgcgataaagtcggcaaactgggggttgcaccgttaaccagtatgttcctgtttgggccgaaccaaccgagccctgcaaataactatcgtccggagttgcacgactctaacggtctctctatccatgccggtaatggcgaatggatctggcgtccgttgaataacccgaaacatttagcggtcagcagcttctccatggaaaacccgcaaggctttggtctgttgcagcgcggtcgtgatttctcccgctttgaagatctcgatgatcgttacgatctccgtccaagcgcatgggtgactccgaaaggggagtggggtaaaggcagcgttgagctggtggaaattccaaccaacgatgaaaccaacgataacatcgtcgcttactggacgccggatcagctgccggagccgggtaaagagatgaactttaaatacaccatcaccttcagccgtgatgaagacaaactgcatgcgccagataacgcatgggtgcaacaaacgcgtcgtagtacgggggatgtgaagcagagcaacctgattcgccagcctgacggtactatcgcctttgtggtcgattttaccggcgcagagatgaaaaaactgccagaggataccccggtcacagcgcaaaccagcattggtgataatggtgagatagttgaaagcacggtgcgctataacccggttaccaaaggctggcgtctggtgatgcgtgtgaaagtgaaagatgccaagaaaaccactgaaatgcgtgctgcgctggtgaatgccgatcagacgttgagtgaaacctggagctaccagttacctgccaatgaataagacaactgagtacattgccgaagactgatatccgcgccgttcatcaggcgctggatgccgaacaccgcacctgggcgcgggaggatgattccccgcaaggctcggtaaaggcgcgtctggaacaagcctggccagattcacttgctgatggacagttaattaaagacgacgaagggcgcgatcagctgaaggcgatgccagaagcaaaacgctcctcgatgtttcccgacccgtggcgtaccaacccggtaggccgtttctgggatcgcctgcgtggacgcgatgtcacgccgcgctatctggctcgtttgaccaaagaagagcaggagagcgagcaaaagtggcgtaccgtcggtaccatccgccgttacattctgttgatcctgacgctcgcgcaaactgtcgtcgcgacctggtatatgaagaccattcttccttatcagggttgggcgctgattaatcctatggatatggttggtcaggatttgtgggtttcctttatgcagcttctgccttatatgctgcaaaccggtatcctgatcctctttgcggtactgttctgttgggtgtccgccggattctggacggcgttaatgggcttcctgcaactgcttattggtcgcgataaatacagtatatctgcgtcaacagttggcgatgaaccattaaacccggagcatcgcacggcgttgatcatgcctatctgtaacgaagacgtgaaccgtgtttttgctggcctgcgtgcaacgtgggaatcagtaaaagccaccgggaatgccaaacactttgatgtctacattcttagtgacagttataacccggatatctgcgtcgcagagcaaaaagcctggatggagcttatcgctgaagtcggtggcgaaggtcagattttctatcgccgccgccgtcgccgcgtgaagcgtaaaagcggtaatatcgatgacttctgccgtcgctggggcagccagtacagctacatggtggtgctggatgctgactcggtaatgaccggtgattgtttgtgcgggctggtgcgcctgatggaagccaacccgaacgccgggatcattcagtcgtcgccgaaagcgtccggtatggatacgctgtatgcgcgctgtcagcagttcgcgacccgcgtgtatgggccactgtttacagccggtttgcacttctggcaacttggcgagtcgcactactggggacataacgcgattatccgcgtgaaaccgtttatcgagcactgcgcactggctccgctgccgggcgaaggttcctttgccggttcaatcctgtcacatgacttcgtggaagcggcgttgatgcgccgtgcaggttggggggtctggattgcttacgatctcccgggttcttatgaagaattgccgcctaacttgcttgatgagctaaaacgtgaccgccgatggtgccacggtaacctgatgaacttccgtctgttcctggtgaagggtatgcacccggttcaccgtgcggtgttcctgacgggcgtgatgtcttatctctccgctccgctgtggtttatgttcctcgcgctctctactgcattgcaggtagtgcatgcgttgaccgaaccgcaatacttcctgcaaccacggcagttgttcccagtgtggccgcagtggcgtcctgagctggcgattgcactttttgcttcgaccatggtgctgttgttcctgccgaagttattgagcattttgcttatctggtgcaaaggaacgaaagaatacggcggcttctggcgcgttacattatcgttgctgctggaagtgcttttttccgtgctgctggctccggtacgcatgctgttccatacggtcttcgttgtcagcgcgttccttggctgggaagtggtgtggaattcaccgcagcgtgatgatgactccacttcctggggtgaagcgttcaaacgccacggctcacagctgctgttagggttagtgtgggctgttgggatggcgtggctggatctgcgtttcctgttctggctggcaccgattgtcttctcgttgatcctgtcaccgtttgtttcggtgatttccagccgtgccaccgttggtctgcgcaccaaacgctggaaactgttcctgatcccggaagagtattcgccgccgcaggtgctggttgataccgatcggttccttgagatgaatcgtcaacgctcccttgatgatggctttatgcacgcagtgtttaacccgtcatttaacgctctggcaaccgcaatggcgaccgcgcgtcaccgcgccagtaaggtgctggaaatcgcccgtgaccgccacgttgaacaggcgctgaacgagacgccagagaagctgaatcgcgatcgtcgcctggtgctgctaagcgatccggtgacgatggcccgtctgcatttccgtgtctggaattccccggagagatattcttcatgggtgagttattacgaagggataaagctcaatccactggcattgcgtaaaccggatgcggcttcgcaataaaaacgtagttgcctgatgcgctacgcttatcaggcctacatcgttcctgcaatttattgattttgcaagactttgtgggtcggataaggcgttcacgccgcatccggcaaaaacaacgagccaataaaaataccggcgttatgccggtatttttttacgaaagaggtatcaaatgcgtttaattgtggtgagcatcatggtgaccttgctgagtggctgtggcagcattattagtcgcactataccggggcaggggcatggcaaccaatattatcccggtgtgcaatgggatgtgcgtgactccgcctggcgttatgtcacgatccttgatctgccattctctctggtttttgatactttactgctgccgatcgacattcatcatggcccgtatgagtgattaacgttcatcccactcatcagctgctgcgcgtccttcctcggtatccagcggtggctcaagctgaaattccccctcgtcccattcatgtaatgtattctcttcctgccactcctggcgtatctctatctcatcatagtcgccatcaaaaacactttgcgcggcttcaccgctaagcataggtaaacattcaccttcttccccttcgtcggcaaaaaactcaacttgccacatgatgtcgccgtcctgcaaaacgtatttttgggcattgaactgttgcacattcgcatcttcggcgtcgatgccggggttgtctgcaagaaattcttcgcgtgcagcgtcaatggcttcttcaagcgttgcgtacatggtcatcacgattctccctttgagttgatgaggtttcagggaaaaggatagctgattctccgcttttgcaagtatgaaaggcgaaaaatcagttgcttacctggggtattcgacgacgacgtagactgttccaactatagactgcgttgaataacactacgccagcggtgacgagaaataccgctctgaaaccgtagttcgcactaatcgctgctcccatcaatggtccggtaacgttgccaatatcacgaaagctttggttatagctgaagatacgcccggcgatctggttgctgctgttgtaaaccaacagtgtctgtacggcggggagtagtgcaccatcggcggcaccgagcaaaaaacgtaaaatcccaagttgcaatggcgtctgaacgtaagacattgggatcaacagcagtacagaaaagatcagcgctgtaatcaggatcttttcgggtccgattcgatcgccaagtttgccgagtcgtggtgcacttagcagagccgccacgcctggcacgctggcgatcatgccactgataaaggcgacgttactgacgttacccgccagttcgcggacatacagcgtcagaatgggggcaatactgcccgtcgccacctggatgattaacgtagtgacaaacaggctgagtaccagtttcgggtttttaagacttgtcaccacttcccgcatgtgcagcatctcttttttgctgaccggctggaatttttctctgatgcaaaacagggtgacgaaaaagcagagtatgagcacactggcggtaataaagaataccggacgtaagccgtagctatcggcgagcaggccgccagccattgggccgagcaacgcaccactaacgccgcctgtggagagcgtacccagcgcccagccgcttttattacgcggtacttgtgtggcgataagagcattagcgttggggacaaatccgccaagtaacccaagaagcgcccgcaggatcaaaaactgccagatattttgtgccagccccatcaacaccatcacgatgcccatgccgagggcagagcgtaatagcatgagttttcggcctttacggtcggcgagtccaccccaaaacggactggcgatggcgctaaataaaaatgtaatgctgaagacaataccggaccacatattcagggcggagtgaccggtaacgccaagctgctcaacgtagaggggtaagaagggcattaccagactgaaggcggcaccggtaagaaaacagcctagccaggcgacgatcaggtttcgtttccagtttataggggtgtcattttcacagggactcatagcaatccgctgttggtgcgccaggcgcggtgaacataagaagaaaagataagcacactaattatgcgcccgacttccagggggcgcaatccagagagcttttatcgctaaatcagggggatttgctgtggtaatgccggatgccattctgaagcatccggcatgggagatttaatagcgactaggaacgccttccgggcgtgttttaaagcgacggtgtaaccacatatactgctctggtgccatcatgatgcatttttcgaccactttgttcatccacgcggcggtagtttcggcatcatccagtggcggagaacactctggcggcagcataatcaattgataccctttgccatctggcttacggcgtggaacgaagggcaccagacatgcgccggacatccgtgccagcatccaggttccggtcgtggtcgcagcctgctcaacggcaaacaacgggacgaaaacgctactgcgcgggccgtaatcatgatccggtgcgtaccagaccacttcgccttttttcagggctttaatcatgccttttaaatctttgcggtcgagcatgcttttattactgcgcaaacggccccaggtttgtagccagtcaatcagtggattatcgttcgggcgataaacgccaatacccggttcctgcataccaaactgccgcgcacccagctccagtgtcagaaaatggatgccaactaacaggatgccgcgtttttgcgcctgcacgtcacgaatgtgttccatgccgatcacttccgtccagcgggcgattcggcggtccggccagaaccacgccatgccggtttccatcaggcccatgccaacggattcgaaattcttcaccaccattttacggcgttcttgttcgctcatttccgggaagcacagttccaggttgcgatgcacaatttttgcgcgtcgtttcataaaacgtaacgccagttttcctaatccacaaccgaggcggtagataaccgggtagggcaattgcacgactaaccaaagtacgccaatacccaaccaggttaaccaataacgcggatgaagcagtgcggtggagaacttgggtagattcgtcatatcaatcctgtttttcaacctattcgggcaattgtatgtattgtcgcattttttcgcccgcaaccaaaatttgtggctgaagactgggcgaaattgccgcgcttgtaaataacaaataatttttaatgcgcaaatgtagcgtaaaatgtgtggatgttaattatcgataattgctatatcatgccgcggatttttactttcccatctcgcaggaaccgtacaccatgccagtgttacacaaccgcatttccaacgacgcgctaaaagccaaaatgttggctgagagcgaaccgcgaaccaccattagcttttacaagtatttccacatcgccgatcctaaggcgacccgtgacgctttatatcagctgtttaccgcgctgaatgtttttgggcgagtgtatctggcgcatgagggcattaacgcgcaaatcagcgtacctgcgagcaatgttgaaacatttcgcgcgcagctctatgccttcgacccggctttagagggtttacgcctgaatatcgcgttggatgatgacgggaaatccttctgggtactgcgcatgaaggtacgcgatcgcattgttgccgacggtattgacgatcctcactttgatgccagcaatgttggtgagtatctgcaagcggcggaagtgaacgccatgcttgacgatcccgatgcactatttatcgacatgcgtaaccactatgagtatgaagtggggcactttgaaaacgcgctcgaaattccggcagataccttccgtgagcagctgccaaaagcagtcgagatgatgcaggcacataaagataaaaaaatcgtcatgtactgcaccggcggcattcgttgtgaaaaggccagtgcctggatgaaacataacggattcaacaaagtctggcatatcgagggcggaattattgaatacgcccgtaaggcgcgcgagcagggcttgccggtgcgttttattggcaaaaattttgtttttgacgagcggatgggcgaacgtataagcgatgagattatcgcgcattgccaccagtgcggcgcgccgtgcgacagccataccaactgtaaaaatgatggctgccacctgctgtttattcagtgtccagtatgcgcggaaaaatacaaaggttgttgtagtgagatttgctgcgaagaaagcgcgttaccgccagaagaacagcgacgccgtcgggcaggacgtgaaaatggcaataagatctttaataagtctcgtggacgtctgaatacaacactgtgcattcctgatccaacagaataaatatcattgccggatgcgtgccatccggcaacatttcacgcttacttctgctgtacgccttccacactaataatcagatccacttcctgagaagctggacctaaatctgtcttgatattgaagtccttgagcttaattttgccttcggcctcgaagcctgcacgtttaccaccccatgggtcgtcgccctgaccaattaatttcgcttccagcgtgacgggtttggttacgccattcagcgtcagatcgccggtaatatccagttcgtcaccgtctttcttcacgctggtggaggtgaatgttgcctgtggatattttgcggtattgaggaaatctgcactgcgaagatgtttatcgcgttcggcgtgattagtatcgacgctggtggtgttaattgtcacattcactttatcggcagccggatttttttcgtcaaaggtaaaagtaccgtcgaaatctttaaaggtgccgtataaccagctatagccaaggtgctggatgcggaaattaacaaaggcgtgctgaccttctttgtcaattttgtaatcggcggcaaccgcactaccggcagagaacatcagggacgcgaaggttaaaccaagcaggctttttttcattttttatactccatagtcagaactgctctttcccagcatgcgcttcagagtgtcgtctttatcgatgaaatgatgcttcagggccataaatccgtgcataacggacagtactacgacgctccacgcgagccaaaaatgcagggcaccggcaaagtctgcctgtgcgccagcgtcggcaagggtcgcggggacgtcaaaccagccaaaaacgctgatcggtttaccatcggcagtactgatcagatagccgctgatgccgatggcgaaaagcaataggtacaatgcgagatgtccagctcttgcggcaagacgagtcatggggctataactcggcagcggacccggcggtggagatatgacacgccacagaacgcgaataaccagccccatcattaacaaaataccgatgcttttatgcagttcgggtgctttgtgataccagccatcgtaataactgagcgtgaccatccacagacctaaagcaaacatgccgtagacaataattgcgcttagccaatggaaggccgcagatataacaccatagcgttcaggggtatttgtgaaactcataagtgcatccaaaacgaatttgcgagagaaagaaaatggcgtgtcggagaatgaattgcaacacaaaaataacaaattgaatgatatttatttttatttcaataattttgaattaataatgaaagaatcttcataagtttagtgggttcagcatcagagatgtctggtgagtgctgtagaagcaggaataatctcattcaatttttcacgctaaatgaaagggagattaaatatttgtcagtttatgtcagtgcggaaaattaaaaataaaacacatagatcagatccataattgccaacaatccccagagaaaaagataaagcatcagatgctcgcgaatattattgatgagatagtgcaacagccgacgcattaaatactcctgtaaaaacggcctcattctggaggccgtaatgatgattattggaagcgggaaagcctgaatggcgtcaaatcaaaatcgctttttttgtcttgcgcaaaatcggcagctatttcccctaaaacactcgcaaatttaaaaccgtgcccactcaggccggtaatgagcagtgtattatcgtggccgggtagggtatcgataataaaatcttcgtcagggctattatcataggtgcaggcagcgccgtacaggcagcaaccgatacccggcaatacattgcgcaagaacgggaaggcttcactcccatcactggccacttccgcaaacggaacacgttcatccgcactatggataacctggcctccgttatgtttgccaatcttcaacgcgtcgttttctgccggaaaaccataatattgatcgccattgggcagttcaccggtaaacgccgggaatttattcttcacgctatagcggccatcggcctgataccaggcaaatactttgcgtacgggctggacaggcagctccgggagcaggtcttttacccatgttcccgcgcagacaatcgcttttttcgcctgatactcaccgtcagccgtttcaatagttacgccatcatcgtcatgacgaattgcggtgaccgggcagttgaacagttgcgcacagcccgcttccttcgccagttggatccaggttttaatcgccagttcgctgcgcaaaaaaccggaatcagtttcaaataagccgatgtagttgtccgggacgcgtatttccggccagcgggccataatcccttgcgcatcgagcttttcaacgttgagttgccattgttcggcgctgtgggcgacgttggcgagaaatgtggaatcagccgggccaaggttaatgacgccagagcgtacaaaaatgggatcttcttcgttgtggcgggagagttcatcccacagcgtttgcgcgcggaggaccagcgggacatacttttcgccttcaccataagcatggcgaattaatcgcgtatcgccgtggtggctgccgtgttgatgcggtggcatatgggcgtcggtcattagcacgtttaaaccggcgcgggttgcataatacccggcggcagcgcctacggaaccgctgccaataatgatgagatcgtatttcatttttttctctctgctctcatggtttaagcagagtaattaactgaatgcagatatacaacccagaaatggtaaaggcaccggtgaggtgccttttgggtggatggtcatgtcatgttaatgacgccgatactcgtttacctggaaatcaccggattcaattttggcgattcctgcttctaatatgctaataaattgtctggcaacatcagtggttaaccagagcgtctgaccaacttcagtcccttcctgctcggacttatttggggtctggtagtgcaaacgcaacatcagcgcatcatagctatcaacggtgctgatgtcccaccctacgagcggatgagtctgaatgacttcattatttttttccatcatggccccctaattcgtgttactagacaacgttattcgaggttcaatgcgtttttatctgaagcaacttcagtataccaataagtaagggtattcaccgaatttttaaagggggaaacagataaatttctgcttttaagatttatatgaacaataaaacagcatgtcattcatatttttttagcatattgtgcaattattttgaggaagtgtagaaattttgtactcaaaattcgtaagtaaaataaaaaagccggggcgacccggcaaaaaaaatcactgcatattattcgctgacaaaccagtcatcggcgctttcccacgtttcctggagaatttcactaatgcgctgtttatcttcttttgtcgcgccaataacgcttaaattattcgctgcggcataacgtacgcttacgtggccttcattatcaggaaacgcatactgaatacggcgggaaagttcgccagccagggcgtcaatagccccagctggcaatggagaagttttcgctatggtgacttcaattcgcataatagccccctgttgaatatactggttatttatacaggtaaaataacctaatgacaacaggaagctacgatttttattgtttaacggaccagcgtaccgtttccccggcgaggaatggcaccagcgtgtcatcagtcagtgcgatgctttcagcaacctgttgctcttcacgtaccagttcgatgaatgtgtcgttgaccggcaacccatagaactgcgggccgtttacagaacagaatgcttcaaagtgctgcaaagcattcatttcttcaaagacggtagcgtaactgcccagcgcggttggggcgttgaagcagcccgcgcagccgcaactgctctctttgcgatgacgtgcatgtggcgcagaatccgtaccgaggaatactcgattaaaaccgctggcgaccagttcacgcaatgcctgttggtgaatattacgtttgaggatgggtagacaatacaggtgcggacgcacgcctccaaccagcatatggttgcggttaaacatcagatgctgcggagtgatggtggcagccagccgttcatttccgtcacggacatagtcggcagcatctttggtggtgatgtgctcaaaaacgactttcagcgcagtcaggcgctggcgcagaggttccatcacgctttctataaagcgcgcttcacgatcaaaaatgtcgatatctgcatgtgtcacttcaccatgcaccagtagcggcataccgattttttccatgcgctcaagtaccggcatgattgcgtcaatactcgtcacgccgtggctggagttagtggttgcgtttgccgggtaaagttttgcagcggtgaacacgccttcgttaaatccgcgctccagctcattaggatccaggctatctgttaaataacaggtcatcaatggggtgaaatcgtgcccggcaggtacggcgtcaagaatacgctggcgatacgccacggcagcctcaacggtggtcacgggcggagccagattgggcattacgatagcccgtccataaatttcgctggtatatggcacgacagtttttaacatgtcgccatcgcggaggtgaaggtgccagtcgtctgggcggcggatctttaatacctgggatggtgcagtcattaatctctatgctccggctgaagggatgtttttgccggacacaaaggataagcggaaacgttttcctttgcacgaaaaataaagggcgcgaatgcgccctcgtgattaatcagtaaatggaatgacaatttcgcctggcttcacttcaatgcctttcgccagttttttcgccattgcttcgccctggctgccatcttcgcgcaggacgtaagcaggttgctggttaaagtaattgcgtaatgcctggttcaaatagggaagcaacgtttgcatcaccgtttgcattttttccggttgtaccgtcgcatcgaccacttccatctctttcaggaagatcgcacctttttctttatcaaacacgggcagcgctttcagcttcagtttcatggtcgctttctgactaccgaacagggagttcatgtccagattggcgtctccggttagggtaaccttattcggctcttcgcgaccaatttggctggtcaggtttgtcagaacaatatgggcgtcagccacgccgggtaaaccgatatctttactgaaattattatgtttcgcaaggctctggttaatttcttgttcggtgatggtgtattgggtgagttgattacagccaacgagcaggccactgacgatcaatgcagcggcaaataaaaacttgttcatggtagtcctcgacatgaaatctgcgtcaatatcctgacacaacgcagcatgtgtcaccagcgataaactcgccagcagaaaaaactgaaaacggcggcaacccgcgaatacaggctgccgcggcgggtcaggattaaatcgccatactacttaacaaattgatttgtgtctgtttcgccatattatcgcggtaatcagcaacgcggcttggccagttaattccggctaccagcgtcagattacgcagtagcgggaatagctgaatatcatcttcgctaagttcgccattcacggcgttcggtttgacgatcagtttgtccagcgcacgtaaatcatcgctgatattcttaatcagaccgtcagagtgggccagcaggtcggcaaaattacccgcgctggcctctttcttgtcgacgaaatatttgcgcgcggcgggagtagaaaactcatcaaatgcgcttttggcaaaacgcggcaacagcagtttgttggcgtagccattgaccttgcgcagccactcttcaatggcaggggaacgtttgccggtcagtaacggtttgccgtcgagtttatcgacatagtgaacgatgtccatgctttctggcatatagcggctgtcatctttttgcagaatgggaacctgtttttgaccgaccatccgggtgggtgtttctgcgtcgtcgttgagcagaacatgtaattcgacggggatatttttcaggccgaaaatcatgcgggctttgaggcagtaagggcagtgatcgtaaatgtatagcttcacgtgactcctccatttggctgtcagttcactttcagtatgaaggagtcaggggggagtatcaaatcaggcgtcgcgttcaagcaaacgacgcgcggcgcgtttctggctaaactgccaacccagcgcaaggaaagtgaagatgccaataatgcccagcatcatccacggaagctctggctggtgcgcgcttttgcccaggtcaaacagccagccgccaccgatataaccaatagcgccgccaatcgccagacccagacggctaaaccccatatagctgccgcgagctcttgcgtccgccaggctagcacttaaggtttcacgcgcaggctcggcaatgatgctcccgatataaaacagacaaatcagggtgaaaagttgttgcaggccgctgaccatgcccaccggcatcatgcttaaactcattatcaacagcccagccatcaaccggtgttccagacgaaaatgcttttcactccagcgggcgatagggtagagcaacgttaagctcagacacgcttcaatggcatacatccatttaacggcagagggcgcgcagccacgtcgttgaccataattggcagcatcagcatcacttgtacagccagcatgtagtaacccgccagcgtcagaacataggtgacaaaacgcttgtcacgcatcacgcgggtcatgccttcgcgaacgggcgtgcgtacggtggagagtttccatgctggtaacaaccacgcattgaacgccgcacatagcacaaatagaactgcccctgtggcgcagaccaggcgaaagtcgtattgcaacagccagctccccaacaatgcgccaatgaccgcaccggcactgtcctgcatcatcaacaggctgaaaaaacgaccacgctgctgtggacggattaatttcaccaccagcgcgctacgcggcggatcaaacaacgtgccaccgagtccgctgagcaggcaactaaaccacaatagccacggttcgtgggcgatacccattgtggcgaatccggcggcgcgcatcagcataccggtaacaatcatcggtttggcaccaaagcggtcggcaattgcaccgccgaaaatacccagaccttgctgaataaattggcgtagaccgagagcaataccgaccatgacggcggcccagcccatttgatcaacgaagcggatagagatcagcgggaagacaacaaagaaccccagcacgaccagcatattatcgatgagcaggaaatatttacccaggttcctcgcctggctcacgcgggacatttcccctcccgggaaataaaagatgagcactttctattctgcattgccgctaagacttttcccatcacttcggggacaatatttttttatcaaaacgtcgctttgatagagagtttttatcaaatatgtgaataatgcagaaaatggcattttggacttttcacagggtctggttgcgcaggtatagtaatacttacagcgtattaaagacgttacgggaaggagtaggtatagaatgtttggctatcgcagtaacgtgccaaaagtgcgcttaaccacagaccgactggtcgtgcgtctggtgcatgatcgtgatgcctggcgtcttgcggattattacgcagagaatcgccatttcctcaagccctgggagccagtgcgcgacgaaagccactgttatccaagtggctggcaggccaggctggggatgattaacgaatttcataaacaaggtagtgctttctactttggcttattcgacccggacgaaaaagagattattggcgttgccaatttttccaatgttgttcgtggctcttttcatgcctgctatctcggttatagcattgggcaaaaatggcagggcaaaggactcatgtttgaagccctgaccgcagccattcgttatatgcagcgcacccaacatattcatcgcattatggctaattatatgccgcacaataaacgcagcggtgatttactggcgcgactgggttttgaaaaagaaggctatgcgaaagactatctgttgattgatggacaatggcgcgatcacgtactgacggcattaactaccccagactggacgcccggccgctaaggagaatctcatgaaatatcaacttactgcccttgaagctcgcgtgattggttgcttgctggaaaagcaggtgaccacgccggagcaatacccgctcagtgtcaatggtgtagtcacggcctgtaatcagaaaacgaaccgtgaaccggtcatgaatctgagtgaatccgaagtgcaggaacagctggataatctggtcaaacgtcattatctacgcacagtgagcggttttggtaatcgggtcaccaaatatgagcaacgtttttgtaatagtgaatttggcgatctgaaactgagcgcagcggaagtggcgttaatcaccacgttgttattgcgtggtgcccagacgccaggtgaactgcgcagccgcgccgcgcgaatgtatgaattcagcgatatggcggaagtggagagcacgctggaacaactggcaaatcgcgaagatggtccttttgtggtgcgtctggcccgcgaaccgggtaaacgcgaaaaccgctacatgcatcttttcagtggtgaggttgaagatcagccggcggtgacggatatgagcaacgcggttgacggtgatttacaggcccgcgtcgaagccctggaaatcgaagtggcagaactgaaacagcgtcttgatagcttgctggcccatctgggagattaaagtgaaaaaattacgtatcggcgtagtgggattaggtggcattgcgcaaaaagcgtggttaccggtgctggcggcagcgtctgactggacgttacaaggagcctggagccctacgcgcgcgaaagccctgccaatttgtgaaagctggcgcattccttatgccgatagcttatccagccttgccgccagttgcgatgcggtttttgtgcattccagcaccgccagccactttgacgtggtcagtacgttactcaatgcgggggtacatgtctgtgtcgataaaccgctggcagaaaatctgcgcgatgctgaacggctggtggaactggcggcgcggaaaaaactgacgttgatggtcggttttaaccgtcgtttcgcaccactctacggtgagttaaaaacgcaactcgccaccgcagccagcctaagaatggataaacatcgtagcaatagcgtcgggccacacgatctttatttcacgttgctggatgattatctgcatgtggtggataccgcgctgtggttgagcggcggcaaagcctctctggatggcggtacgctactgactaacgacgctggcgaaatgctgtttgccgagcaccattttagcgctggtcctttgcagatcaccacctgtatgcatcgccgtgccggaagtcagcgtgaaaccgtgcaggccgtgactgacggtgcgctcatcgacattacggatatgcgcgaatggcgtgaggagcgcgggcagggcgtagtgcataaaccgattcctggttggcagagtacgcttgagcaacgtgggtttgtcggctgtgcgcggcacttcattgaatgtgtgcaaaaccagacagttccgcaaaccgccggcgaacaggccgtgctggcgcaacgtatcgttgacaagatctggcgcgatgcgatgagtgaataaaccctgtaacatctggcggtagcaattcaccataatccaggtagactattcgcctctttcagcgcctgccttgcaggcgttttgcccgtgggtctggattagaacaccgatgaatttattaaaaagcctggccgccgtcagcagcatgaccatgtttagccgtgtgcttggcttcgcacgagacgcaattgtcgccagaatctttggcgcagggatggcaaccgacgcctttttcgtcgcttttaaacttcctaacttgttacgccgtatctttgccgaaggggcattttcccaggcatttgtaccgattctggcggaatataaaagtaagcagggtgaagacgccacgcgggtctttgtctcttatgtttctggcctgctgacacttgcgctggcggttgtgacggtcgctggcatgctcgccgcaccgtgggtgatcatggtgaccgcgccaggcttcgctgacacagctgacaaatttgccctgaccagccagctactaaagattacctttccctatatcttgctgatctccctggcgagcctggtgggagcgattctgaatacgtggaaccgcttcagcattccggcgtttgctccaacactgcttaacatcagcatgattggtttcgcgctgtttgccgcaccgtactttaacccaccggtgctggcgctggcgtgggctgttacggtcggcggcgtcctgcagctggtgtatcagctaccgcacctgaagaagatcggcatgctggtcctgccgcgcattaacttccacgatgccggagcaatgcgcgtggtgaaacagatgggaccggcgatccttggcgtctctgtgagccagatctccttaatcatcaacaccatttttgccagctttcttgcttccggtagcgtgtcttggatgtattacgccgaccgcttaatggagtttccgtccggtgtgctgggcgtggcgcttggcaccattttgctgccgagcctgagcaaaagttttgccagtggcaatcatgatgaatacaaccgtttgatggactgggggttgcgtctttgtttcctgttggcgctgccgagtgcggttgcgttgggcattctttccggtccgttgaccgttagcctgttccagtacggtaaatttaccgcgtttgatgcgctgatgacccagcgggcgttaattgcctacagcgtgggtttgattggcctgattgtagtgaaagtgttggctcctggcttttattcccgccaggacattaaaacgccagtgaaaattgccatcgttacgctgattttaacgcaattgatgaacctggcgtttattggtccgttgaaacatgccgggctgagtctttctattggtctggcggcgtgtctgaatgctagcctgctttactggcagttgcgtaagcagaaaatctttaccccgcaacccggctggatggcgtttctgttgcgtctggtggtggcggtactggtgatgtctggcgtgcttttaggtatgttacatatcatgccggagtggagtttgggtaccatgccctggcgtttactgcgtttaatggcggtcgtgctggcggggattgccgcgtacttcgctgcactggcggtactgggcttcaaagttaaagaatttgcccgccggacggtgtaacaatgcattccggcctgcagtgttcgctttaaaacatatcatgaaactgggtatgttttgtctgcctgctctgggatcgctggggcgggcatttttttgcctattttgcattgttggttagcaaggatgccattcgatgaattttaatatgttgattcaaagatgaaataaaaaagccctgcagttaccagggcttgattactttgagctaattattactcaacaggttgcggacgcgcaggagcggcagaggcatgatgtgttgccgtatgaccacctgcggcacctttaccttcgaaggcaaaagtagggcgctgccagtcactgtgacgcggtgcctccggaacatattccggtgctggagcgcgcgtcattggcgcggtagcgtggttatgctcaacggtgacctcaggttcgaccgcagctaccgtttcaacttctgctgcgacttcagcgactactggcgcggcaggttgagcaacaacttcaggttcagcaactacaacctcagcagtttcgacaacttcttcaatatctgccgtctcttcctgcggttcaaccaccggttctgcttgttctgcaacttcctgggctacggcaacatcagactcggtaatcacctgcggctgttcagttaccgcggcagcgatcacttcaggatgcgtcgtttcaaccacttccggttgcggttcggcaacctgaacgggggcttctacgacaccggccacttcttcaacaactggcgcgctaacaaccggttcgatagcggcggcgacagggacctcagtcaccatcggctgcacatgtacttcttcctgttcgcgctgctcttcaacctgtacatcttgcggacgtacaattggatagcggatccagactttgccagaggccagttccggagacgcgcacgctacggtcaacggcattgggctctgggttggataacgctcgtcacgatagcgacgacgacgctgaccacttacgcgcaggtgacgagggctgcggcgagaacgacgcggcatgccaccgttgtcacggttatcagcattgttctcttcttgctgttctggtgcagtttgcgctacgactggcagcgggactttcaccagttctgtgcgtggagctggcgcttcctgaacaattggttcggcagcgacagtttcttcaaccaccggtgcgactaccgcttcttcggctacgctttgctcgtaacgcactttctgattgagctgacgctgtttacgacgcggctgaaccggacgtacacgttcttcctgttcggtttcctgaacagattgctcttcaacattcagcgccttcgcttcttgttgcgcctgacgtttatcatcattacggcggcggctacgttcacgacgcggcgcttgctgctcgtcggcggtacgcgctttttccgttacctcagcctgctgacggctctcacgcgtctcggcagtctgctgctgtgcctggcgacgattacgacggttttcttcgcgattatcgctgccttcagtacgttcactacgggtgtcgcggcgctcattacggtcacggcggttgttctgacgaggcttgcgacgatcctgttgacgttccggtttcgcttctgctttcggtgctggttgctcggtcggtttggtttcttcaccaccgctgaacagcgctttcagtgcgccgaagaagcggctcaacagcccaggttgtgcaggagctgctggtgttgccggtgcagctttcggtgctggagctacaacaggcgcggcaggttcagctggcgttggcgcaggcggcacatccggcatggcaaaggttgccagcgcaggttgttccggacgcttacgttcagcgaactcttcttcagacggcagcgccatcgcttcttcatgcagcttcggcagcatgtagcttaaggttggggtttcttcccctttacgcacgcgcagcacgtggtagtgcggggtttccatctgatcgtttggcacaattacacagcgcacaccgtcctgacgagtttcaatggcatttaccgcagaacgtttttcattcagcaggtaagaagcgattggcacaggaacaatggcgtgaacttcctgggtgttctctttcagcgcttcttcttcgatcagacgcagaatagagaggctcaggctttcgttgtcacgcacggtgccagtaccagaacaacgcggacaaacgtgatgactggattcacccagacttgggctcaggcgctgacgggacatttccagcaggccaaagcgagaaatatggctgatttgaatacgcgcacggtcctgacgcaccgcttcacgcagacggttttctaccgcacgctggtggcgtactggcgtcatgtcgatgaagtcgataacaatcaggccgccgaggtcacgcaggcgcagctgacgagcaatctcatcggcagcttcgaggttagtgttaaacgcggtttcttcgatatcgccgccgcgggtcgcgcgtgcggagttgatgtcgatggccgttaacgcttcggtgctgtcgataacaatggaaccaccagacggcagacgaacttcacgctggaaggcggactcgatctgactctcgatctggtagtggctgaacagcgggatctcgccggtgtacagtttgattttgctgctgaaatccgggcgacctaatgcagcgatatgctgacgtgccagttcgagcactttcgggttatcgataaggatttcgccgatgtcctgacgtaagtaatcgcggaatgcgcgaacgattacgttgctctcctgatgaatcaggaacggggccgggcggctttcagcggcttttttgatggcttcccagtgtttcagacggaagcttaaatcccattgcagcgcctcagcagatttgccgacgccagcggtgcgcacgataagccccatgccttccggcagttcaaggcttgccagtgcttcttttaattcggtacggtcgtcgccttcgatacggcgagaaatgccacccgcgcgcgggttgttcggcatcagaaccagatagctacccgccagactgataaaggtggttaatgccgcgcctttgttgccgcgctcttctttatcgatctgaacaatgacttcctgaccttcacgcaacacatctttaatgttgggacgaccatgagcactgtagttagcagggaaatattcgcgggcaatttcttttagtgggaggaaaccgtgacgttcagcgccgtaatcaacaaaagcagcttccagactcggttcaatgcgggtgattttacctttgtagatgtttgcctttttctgctcgtgccctggactttcgatatccaggtcatacagacgctgcccatctacaagggcaacgcgcaactcttcctgctgagttgcgttgattaacattcttttcatcgtaacttactcattattcttacattgacgactaagctgcgggcaaagtaacgcctttccgggtgtgaaccgatggcctcgtgtctagtcgcgtcgccaacctcacggttatcgtcagctcaaagaggcgcagagtgtgagttgcccgtttttcatgcggaaaaacagcgcaattatcaaagaaacagactgggtattactctccagaaatatttccatctaccggtaaggactgcaacccgcagcccgctaactgcctgaaagatcaatacgtcttacgccattgctgcgtggatgatcggtcgggcaaaatgggttattccgtaaaatttcttgttttaacaaggatggacacggaaacggcctcattattccactgcaagccttgttatagcaagatgacttttaccatttatcacccgcttactcacagttttttcacttcttgctggtgattggtttaataaccatcaataaagtgatcacgcagtgaagtaataaggtgcaaaagtaaatataagcatagaaaaatgagtggcgcgaatcctgttggctaattagaatcgccaaccatgaaaacagagactccatccgtaaaaattgttgctatcaccgctgacgaagcggggcaacgtatcgataactttttgcgtacccaattgaaaggcgtaccaaaaagtatgatttaccgtattttgcgtaaaggcgaagtgcgggtgaacaaaaaacgtattaagcctgaatataaactcgaagcgggtgatgaggtgcgtattccaccggttcgcgttgctgagcgggaagaagaggcggttagcccacatctgcaaaaggtggcggcgctggcggacgtcatcttatatgaagatgatcacatcctggtgctgaataaaccttccggtacggcggtacatggcggcagtggtttaagcttcggcgttattgaaggtttgcgggcgttgcgcccggaagcgcggttccttgaactggttcatcgtcttgaccgggacaccagtggtgttttgctggtagcgaaaaaacgcagcgcgttgcgttctctgcatgagcaattacgtgaaaaagggatgcaaaaagattacctggcgctggtgcgcggtcagtggcagagccatgtgaagagcgttcaagcaccgttactgaaaaatattctgcaaagcggcgaacgtatcgtgcgtgtgagtcaggaaggcaaaccgagcgaaacacgctttaaagtggaagaacgctatgcatttgccaccctggtgcgttgtagcccggtaacagggcgtactcaccagatccgtgtgcatacacaatatgcgggtcatccgattgcctttgacgatcgctacggtgaccgtgaatttgacaggcagctcactgaagcaggcacgggattaaatcgcctgttcctgcacgctgcagcgttgaagtttactcatccggggaccggtgaggtgatgcgtatcgaagctccgatggatgaaggtttgaagcgttgtttgcaaaagctgcgtaacgcgcgctaatacaagcatataaacctgataatgggcggttggcctgataaggcgtttacgccgcatcaggccgccagcaccgattgccggatgcgacgtaaccacatccggcgcaaaaaattatcccatcagcgggtttttcccttcccgacgtaacatctgacacagcgcgattagcggtaaaccaaccagcgtgttaggatcacgcccctctaaacgctcaaacagcgtaatgccaaatccttcactcttaaagctacccgcgcagtgcaggggatgctctttacgcacgtaattatcaatctccgcctcgctcaggtgacggaaatggacgtcaaaaggctccacttctgtttgcagatgcccattcgcgctattaaacaacgccagtccagtatagaaggtgacgatattgccgctggctttgcgtaattgcagacgggcattttcttccgttaacggtttaccggtgatttcgccatcaagaacacatacctggtcactaccaataattaaatgatccggataacgactcgccagagattgcgctttttcttgtgccagtcgaagcaccaactgtcgcggactttcgtcgctgcgtggggtttcgtcgacctctggtgctgcacattcaaaagagatttgcagtttttccagaagagcgcgacgccatgggctggtggaggctaaaataagtttaggcatatttttttccatcagatatagcgtattgatgatagccattttaaactatgcgcttcgttttgcaggttgatgtttgttatcagcactgaacgaaaataaagcagtaacccgcaatgtgtgcgaattattggcaaaaggcaaccacaggctgcctttttctttgactctatgacgttacaaagttaatatgcgcgccctatgcaaaaggtaaaattacccctgactctcgatccggttcgtacggctcaaaaacgccttgattaccagggtatctatacccctgatcaggttgagcgcgtcgccgaatccgtagtcagtgtggacagtgatgtggaatgctccatgagcttcgctatcgataaccaacgtctcgcagtgttaaacggcgatgcgaaggtgacggtaacgctcgagtgtcagcgttgcgggaagccgtttactcatcaggtctacacaacgtattgttttagtcctgtgcgtagtgacgaacaggctgaagcactgccggaagcgtatgaaccgattgaggttaacgaattcggtgaaatcgatctgcttgcaatggttgaagatgaaatcatcctcgccttgccggtagttccggtgcatgattctgaacactgtgaagtgtccgaagcggacatggtctttggtgaactgcctgaagaagcgcaaaagccaaacccatttgccgtattagccagcttaaagcgtaagtaattggtgctccccgttggatcggggataaaccgtaattgaggagtaaggtccatggccgtacaacagaataaaccaacccgttccaaacgtggcatgcgtcgttcccatgacgcgctgaccgcagtcaccagcctgtctgtagacaaaacttctggtgaaaaacacctgcgtcaccacatcactgccgacggttactaccgcggccgcaaggtcatcgctaagtaatcacgcatctgcgtgatgaagcttagtgaggattttccccaggcaactggggaaagaccaaaccgggcggcgacgataccttgacacgtctaaccctggcgttagatgtcatgggaggggattttggcccttccgtgacagtgcctgcagcattgcaggcactgaattctaatagccaactcactcttcttttagtcggcaattccgacgccatcacgccattacttgctaaagctgactttgaacaacgtagccgtctgcagattattcctgcgcagagtgttatcgccagtgatgcccggcctagccaagctatccgcgccagtcgtgggagtagtatgcgcgtggccctggagctggtgaaagaaggtcgagcgcaagcctgtgtcagtgccggtaataccggggcgctgatggggctggcaaaattattactcaagcccctggaggggattgagcgtccggcgctggtgacggtattaccacatcagcaaaagggcaaaacggtggtccttgacttaggggccaacgtcgattgtgacagcacaatgctggtgcaatttgccattatgggcagtgttctggctgaagaggtggtggaaattcccaatcctcgcgtggcgttgctcaatattggtgaagaagaagtaaagggtctcgacagtattcgggatgccagtgcggtgcttaaaacaatcccttctatcaattatatcggctatcttgaagccaatgagttgttaactggcaagacagatgtgctggtttgtgacggctttacaggaaatgtcacattaaagacgatggaaggtgttgtcaggatgttcctttctctgctgaaatctcagggtgaagggaaaaaacggagctggtggctactgttattaaagcgttggctacaaaagagcctgacgaggcgattcagtcacctcaaccccgaccagtataacggcgcctgtctgttaggattgcgcggcacggtgataaaaagtcatggtgcagccaatcagcgagcttttgcggtcgcgattgaacaggcagtgcaggcggtgcagcgacaagttcctcagcgaattgccgctcgcctggaatctgtatacccagctggttttgagctgctggacggtggcaaaagcggaactctgcggtaacaggacgctgccagcgaactcgcagtttgcaagtgacggtatataaccgaaaagtgactgagcgtacatgtatacgaagattattggtactggcagctatctgcccgaacaagtgcggacaaacgccgatttggaaaaaatggtggacacctctgacgagtggattgtcactcgtaccggtatccgcgaacgccacattgccgcgccaaacgaaaccgttagtaccatgggctttgaagcggcgacacgcgcaattgagatggcgggcattgagaaagaccagattggcctgatcgttgtggcaacgacttctgctacgcacgctttcccgagcgcagcttgtcagattcaaagcatgttgggcattaaaggttgcccggcatttgacgttgcagcagcctgcgcaggtttcacctatgcattaagcgtagccgatcaatacgtgaaatctggggcggtgaagtatgctctggtcgtcggttccgatgtactggcgcgcacctgcgatccaaccgatcgtgggactattattatttttggcgatggcgcgggcgctgcggtgctggctgcctctgaagagccgggaatcatttccacccatctgcatgccgacggtagttatggtgaattgctgacgctgccaaacgccgaccgcgtgaatccagagaatagtattcatctgacgatggcgggcaacgaagtcttcaaggttgcggtaacggaactggcgcacatcgttgatgagacgctggcggcgaataatcttgaccgttctcaactggactggctggttccgcatcaggctaacctgcgtattatcagtgcaacggcgaaaaaactcggtatgtctatggataatgtcgtggtgacgctggatcgccacggtaatacctctgcggcctctgtcccgtgcgcgctggatgaagctgtacgcgacgggcgcattaagccggggcagttggttctgcttgaagcctttggcggtggattcacctggggctccgcgctggttcgtttctaagataaggattaaaacatgacgcaatttgcatttgtgttccctggacagggttctcaaaccgttggaatgctggctgatatggcggcgagctatccaattgtcgaagaaacgtttgctgaagcttctgcggcgctgggctacgacctgtgggcgctgacccagcaggggccagctgaagaactgaataaaacctggcaaactcagcctgcgctgttgactgcatctgttgcgctgtatcgcgtatggcagcagcagggcggtaaagcaccggcaatgatggccggtcacagcctgggggaatactccgcgctggtttgcgctggtgtgattgatttcgctgatgcggtgcgtctggttgagatgcgcggcaagttcatgcaagaagccgtaccggaaggcacgggcgctatggcggcaatcatcggtctggatgatgcgtctattgcgaaagcgtgtgaagaagctgcagaaggtcaggtcgtttctccggtaaactttaactctccgggacaggtggttattgccggtcataaagaagcggttgagcgtgctggcgctgcctgtaaagcggcgggcgcaaaacgcgcgctgccgttaccagtgagcgtaccgtctcactgtgcgctgatgaaaccagcagccgacaaactggcagtagaattagcgaaaatcacctttaacgcaccaacagttcctgttgtgaataacgttgatgtgaaatgcgaaaccaatggtgatgccatccgtgacgcactggtacgtcagttgtataacccggttcagtggacgaagtctgttgagtacatggcagcgcaaggcgtagaacatctctatgaagtcggcccgggcaaagtgcttactggcctgacgaaacgcattgtcgacaccctgaccgccagcgcgctgaacgaacctagtgcgatggcagcggcgctcgagctttaaaagaggaaaatcatgaattttgaaggaaaaatcgcactggtaaccggtgcaagccgcggaattggccgcgcaattgctgaaacgctcgcagcccgtggcgcgaaagttattggcactgcgaccagtgaaaatggcgctcaggcgatcagtgattatttaggtgccaacggcaaaggtctgatgttgaatgtgaccgacccggcatctatcgaatctgttctggaaaaaattcgcgcagaatttggtgaagtggatatcctggtcaataatgccggtatcactcgtgataacctgttaatgcgaatgaaagatgaagagtggaacgatattatcgaaaccaaccttagttctgttttccgtctgagtaaagcggtaatgcgcgctatgatgaaaaagcgtcatggtcgtattatcactatcggttctgtggttggtaccatgggaaatggcggtcaggccaactacgctgcggcgaaagcgggcttgatcggcttcagtaaaagtctggcgcgcgaagttgcgagtcgcggtattactgtaaacgttgttgctccgggctttattgaaacggacatgacacgtgcgctgagcgatgaccagcgtgcgggtatcctggcgcaggttcctgcgggtcgcctcggcggcgcacaggaaatcgccaacgcggttgcattcctggcatccgacgaagcagcttacatcacgggtgaaactttgcatgtgaacggcgggatgtacatggtctgaccgcgatttgcacaaaatgctcatgttgcgcgcagtctgcgtggttatgagtaataattagtgcaaaatgatttgcgttattggggggtaaggcctcaaaataacgtaaaatcgtggtaagacctgccgggatttagttgcaaatttttcaacattttatacactacgaaaaccatcgcgaaagcgagttttgataggaaatttaagagtatgagcactatcgaagaacgcgttaagaaaattatcggcgaacagctgggcgttaagcaggaagaagttaccaacaatgcttctttcgttgaagacctgggcgcggattctcttgacaccgttgagctggtaatggctctggaagaagagtttgatactgagattccggacgaagaagctgagaaaatcaccaccgttcaggctgccattgattacatcaacggccaccaggcgtaagtgaacatctccaggcggtcgttcgaccgcctgagttttatctttttgtcccactagaatcattttttccctccctggaggacaaacgtgtctaagcgtcgtgtagttgtgaccggactgggcatgttgtctcctgtcggcaataccgtagagtctacctggaaagctctgcttgccggtcagagtggcatcagcctaatcgaccatttcgatactagcgcctatgcaacgaaatttgctggcttagtaaaggattttaactgtgaggacattatcagccgcaaagaacagcgcaagatggatgccttcattcaatatggaattgtcgctggcgttcaggccatgcaggattctggccttgaaataacggaagagaacgcaacccgcattggtgccgcaattggctccgggattggcggcctcggactgatcgaagaaaaccacacatctctgatgaacggtggtccacgtaagatcagtccattcttcgttccgagtacgattgtgaacatggtggcaggtcatctgactatcatgtatggcctgcgtggcccgagcatctctatcgcgactgcctgtacttccggcgtgcacaacattggccatgctgcgcgtattatcgcgtatggcgatgctgacgtgatggttgcaggtggcgcagagaaagccagtacgccgctgggcgttggtggttttggcgcggcacgtgcattatctacccgcaatgataacccgcaagcggcgagccgcccgtgggataaagagcgtgatggtttcgtactgggcgatggtgccggtatgctggtacttgaagagtacgaacacgcgaaaaaacgcggtgcgaaaatttacgctgaactcgtcggctttggtatgagcagcgatgcttatcatatgacgagtccgccagaaaatggcgcaggcgcagctctggcgatggcaaatgctctgcgtgatgcaggcattgaagcgagtcagattggctacgttaacgcgcacggtacttctacgccggctggcgataaagctgaagcgcaggcggtgaaaaccatcttcggtgaagctgcaagccgtgtgttggtaagctccacgaaatctatgaccggtcacctgttaggtgcggcgggtgcagtagaatctatctactccatcctggcgctgcgcgatcaggctgttccgccaaccatcaacctggataacccggatgaaggttgcgatctggatttcgtaccgcacgaagcgcgtcaggttagcggaatggaatacactctgtgtaactccttcggcttcggtggcactaatggttctttgatctttaaaaagatctaagttgtcattttccacccttataaaaggtccgcttgcgggccttttttcttagcttttattccgacttgttccgtagtgaacatgctgccacactaacaattctctgataaggagccggtatgttcttaattaacggtcataagcaggaaagcctggcagtaagcgatcgggcaacgcagtttggtgatggttgttttaccaccgccagagttatcgacggtaaagtcagtttgttaagcgcgcatatccagcgactacaggatgcttgtcagcggttgatgatttcctgtgacttctggcctcagcttgaacaagagatgaaaacgctggcagcagaacagcaaaatggtgtgctgaaagtcgtgatcagtcgcggtagtggcgggcgagggtacagcacattgaacagcggaccggcaacgcggattctctccgttacggcttatcctgcacattacgaccgtttgcgtaacgaggggattacgttggcgctaagcccggtgcggctggggcgcaatcctcatcttgcaggtattaaacatctcaatcgtcttgagcaagtattgattcgctctcatcttgagcagacaaacgctgatgaggcgctggtccttgacagcgaagggtgggttacggaatgctgtgcggctaatttgttctggcggaagggcaacgtagtttatacgccgcgactggatcaggcaggtgttaacggcattatgcgacaattctgtatccgtttgctggcacaatcctcttatcagcttgtcgaagtgcaagcctctctggaagagagcttgcaggcagatgagatggttatttgtaatgcgttaatgccagtgatgcccgtatgtgcctgtggcgatgtctcctttagcagtgcaacgttatatgaatatttagccccactttgtgagcgcccgaattaatcatgaaaaaagtgttattgataatcttgttattgctggtggtactgggtatcgccgctggtgtgggcgtctggaaggttcgccatcttgccgacagcaaattgcttatcaaagaagagacgatatttaccctgaagccagggaccggacgtctggcgctcggtgaacagctttatgccgataagatcatcaatcgtccacgggtttttcaatggctgctgcgtatcgaaccggatctttctcactttaaagccgggacttaccgctttacaccgcagatgaccgtgcgcgagatgctgaaattgctggaaagcggtaaagaagcacagttccctctgcgactggtagaagggatgcgtctgagcgattacctcaagcaattgcgtgaggccccgtatatcaagcatacgctgagcgatgataagtacgccaccgtagcgcaggcacttgaactggaaaacccggagtggattgaaggttggttctggccagacacctggatgtataccgccaataccaccgatgtcgcgttactcaagcgagcgcacaagaaaatggtgaaagcggtcgatagcgcctgggaagggcgtgcggacggtctgccttataaagataaaaaccagttggtgacgatggcaagtattatcgaaaaagaaaccgccgttgccagtgaacgcgataaggttgccagtgtatttatcaaccgtttacgcattggtatgcgcctgcagaccgacccgaccgtgatttacgggatgggagagcgttataatggcaaactttctcgtgcagacctggaaacgccgacagcgtataacacctataccattaccggtctgccgccaggtgcgatagcgacgccgggggcggatagcctgaaggctgctgcgcatccggcaaaaacgccgtatctctattttgtggccgatggtaaaggtggtcacacgtttaataccaatcttgccagtcataacaagtctgtgcaggattatctgaaagtgcttaaggaaaaaaatgcgcagtaagtatatcgtcattgaggggctggaaggcgcaggcaaaactaccgcgcgtaatgtggtggttgagacgctcgagcaactgggtatccgcgacatggttttcactcgggaacctggcggtacgcaacttgccgaaaagttaagaagcctggtgctggatatcaaaagcgtaggcgatgaagtcattaccgataaagccgaagttctgatgttttatgccgcgcgcgttcaactggtagaaacggtcatcaaaccagctctggctaacggcacctgggtgattggcgatcgccacgatctctccactcaggcgtatcagggcggcggacgtggtattgaccaacatatgctggcaacactgcgtgatgctgttctcggggattttcgccccgacttaacgctctatctcgatgttaccccggaagttggcttaaaacgcgcgcgtgcgcgcggcgagctggatcgtattgagcaagaatctttcgatttctttaatcgcacccgcgcccgctatctggaactggcagcacaagataaaagcattcataccattgatgccacccagccgctggaggccgtgatggatgcaatccgcactaccgtgacccactgggtgaaggagttggacgcatgagatggtatccatggttacgacctgatttcgaaaaactggtagccagctatcaggccggaagaggtcaccatgcgctactcattcaggcgttaccgggcatgggcgatgatgctttaatctacgccctgagccgttatttactctgccaacaaccgcagggccacaaaagttgcggtcactgtcgtggatgtcagttgatgcaggctggcacgcatcccgattactacaccctggctcccgaaaaaggaaaaaatacgctgggcgttgatgcggtacgtgaggtcaccgaaaagctgaatgagcacgcacgcttaggtggtgcgaaagtcgtttgggtaaccgatgctgccttactaaccgacgccgcggctaacgcattgctgaaaacgcttgaagagccaccagcagaaacttggtttttcctggctacccgcgagcctgaacgtttactggcaacattacgtagtcgttgtcggttacattaccttgcgccgccgccggaacagtacgccgtgacctggcttagtcgcgaagtgacaatgagtcaggatgcattacttgccgcattgcgcttaagcgccggtagccctggcgcggcactggcgttgtttcagggagataactggcaggctcgtgaaacattgtgtcaggcgttggcatatagcgtgccaagcggcgactggtatagcctgctagcggcccttaatcatgaacaagctccggcgcgtttacactggctggcaacgttgctgatggatgcgctaaaacgccatcatggtgctgcgcaggtgaccaatgttgatgtgccgggcctggtcgccgaactggcaaaccatctttctcccagccgcctgcaggctatactgggggatgtttgccacattcgtgaacagttaatgtctgttacaggcatcaaccgcgagcttctcatcaccgatcttttactgcgtattgagcattacctgcaaccgggcgttgtgctaccggttcctcatctttaagagagacatcatgtttttagtcgacagtcactgccatctcgatggtctggattatgaatctttgcataaggacgtggatgacgttctggcgaaagccgccgcacgcgatgtgaaattttgtctggcagtcgccacaacattaccgggttatttacatatgcgggatctggtaggcgaacgtgacaacgtcgtattttcttgtggcgtgcatccactcaaccagaatgatccctacgatgtagaagatttacgccgtctggcggcagaagagggtgttgtagcgctgggtgaaaccgggctggattattattacacgccggaaactaaagtacgtcagcaagagtccttcatccatcatatccagattggtcgtgaactgaacaagccggttatcgtccatacccgtgacgcccgtgccgatacgctggcaattctgcgcgaagaaaaagtgacggattgcggtggcgtactacactgttttacagaggacagagaaacggcgggtaaattactggatctcggattttacatctccttttccggcattgtgaccttccgtaatgcggagcaactgcgcgatgctgcgcgttatgtccccctggatcggttactggtggaaactgacagtccttaccttgcgccggtaccgcatcgaggaaaagagaatcaacctgcgatggttcgtgacgttgcagaatacatggctgtgttgaaaggtgttgccgttgaagaactggcgcaggtaaccaccgataacttcgcccgtctgtttcacatcgacgcttcccgccttcaatccatccgttgaatgagtttttttaaagctcgtaattaatggctaaaacgagtaaagttcaccgccgaaaattgggcggtgaataaccacgtttgaaatattgtgacatatgttttgtcaaaatgtgcaacttctccaatgatctgaagttgaaacgtgatagccgtcaaacaaattggcactgaattattttactctgtgtaataaataaagggcgcttagatgccctgtacacggcgaggctctccccccttgccacgcgtgagaacgtaaaaaaagcacccatactcaggagcactctcaattatgtttaagaatgcatttgctaacctgcaaaaggtcggtaaaagcctgatgctgccggtatccgtactgcctatcgcaggtattctgctgggcgtcggttccgcgaatttcagctggctgcccgccgttgtaagccatgttatggcagaagcaggcggttccgtctttgcaaacatgccactgatttttgcgatcggtgtcgccctcggctttaccaataacgatggcgtatccgcgctggccgcagttgttgcctatggcatcatggttaaaaccatggccgtggttgcgccactggtactgcatttacctgctgaagaaatcgcctctaaacacctggcggatactggcgtactcggagggattatctccggtgcgatcgcagcgtacatgtttaaccgtttctaccgtattaagctgcctgagtatcttggcttctttgccggtaaacgctttgtgccgatcatttctggcctggctgccatctttactggcgttgtgctgtccttcatttggccgccgattggttctgcaatccagaccttctctcagtgggctgcttaccagaacccggtagttgcgtttggcatttacggtttcatcgaacgttgcctggtaccgtttggtctgcaccacatctggaacgtacctttccagatgcagattggtgaatacaccaacgcagcaggtcaggttttccacggcgacattccgcgttatatggcgggtgacccgactgcgggtaaactgtctggtggcttcctgttcaaaatgtacggtctgccagctgccgcaattgctatctggcactctgctaaaccagaaaaccgcgcgaaagtgggcggtattatgatctccgcggcgctgaccagcttcctgaccggtatcaccgagccgatcgagttctccttcatgttcgttgcgccgatcctgtacatcatccacgcgattctggcaggcctggcattcccaatctgtattcttctggggatgcgtgacggtacgagcttcagccacggtctgatcgacttcatcgttctgtctggtaacagcagcaaactgtggctgttcccgatcgtcggtatcggttatgcgattgtttactacaccatcttccgcgtgctgattaaagcactggatctgaaaacgccgggtcgtgaagacgcgactgaagatgcaaaagcgacaggtaccagcgaaatggcaccggctctggttgctgcatttggtggtaaagaaaacattactaacctcgacgcatgtattacccgtctgcgcgtcagcgttgctgatgtgtctaaagtggatcaggccggcctgaagaaactgggcgcagcgggcgtagtggttgctggttctggtgttcaggcgattttcggtactaaatccgataacctgaaaaccgagatggatgagtacatccgtaaccactaatccgtaagacgttggggagactaaggcagccagatggctgccttttttacaggtgttattcagaattgatacgtgccggtaatgctgaaattacgcggtgtgccgtagacgatagaaccttccacgttggtatcgtaggttttgtcgaacaggttattgacgttcccctgtaagctgaagtttttcgtcacctggtagcgggtgaagagatccaccagcgcgtagctaccttgctcggcgcggaaggtgccatacggcgtcacggtgtcggtatacacgcgattttgccagttaacaccaccgccgaccgtcaactctggcatgacaggcaaccgatagctggtgaacattttaaccgtggtgcgtggcagattaggattaacggcgtttccttcgttatcctctgcaatatagcgcgttgcgccaaatgtcagctgccagttgtcggtaattgcgccgttgagttcaaattccacccctttactgactgtcccatccaccgctttataggcggtttcgccgttgctgccggggataggtgtaccggtggactgagcgacattatcctgctcaatacggaagatggctaacgtggtggtcagacggctattcatccagtcgcttttcagacccagctcgtagttgttaccggtgattggagccagatatttgccactactgtcacgatcattttgcggctggaaaatagaggtatagctggcgtaggtgctccagttgtcattgatgtcaaacaccagaccagcgtaaggcgtggtgtggtttttctccatgctgtaagtcagcgtatcaacccgccagttggtataacgtgcgccgaggatcagatgcagcggatcggcaagggtgacacgagtggcagcatataagcttttcatatgtgtggtatcgtcctgcgccaggctctgtggactccagtcggtttgtgggaaattgccattaaagttgtagaaactgccaatttcatccgggaagatgttggcccaactactgaagtaacgattgttttgtttgctgtaactgccaccaaacattagattgtgctgacgaccaaacaattcataactaccgtcagcgaacaaatccagcgcatcaactttacgtttgccactgttccaaccggtgccgccgacataatcaaagccaggtccataattactgtatggcccaaccagcataccatccgctttgtttacataggcatcgacatacatcattttgctgtcaaattcgacttcagagtgggtggcattcagtgtcgcttgccaggtatcagcaaactgctgcttcagggtcataaagaccttgttgatctctttatcgttgtacgcccagtcaggtgcggtactgcgtgcgcgatcgtaactgttgctgctgccatcagtattccagcgcggtaaaccgccccaggtagggctattaacatcaatgcgctgatattcgtaaccggcactaagcgtcgtaagatcgcctaaatcagcatcgacaatgccgctgaagaaggtcttttcactgttgtagcggtccagccaactgtcgttattctggtagccgccgacaattcgcgcgcggattttaccgtcttcggtgagtgggctttgtaaatccgccacataccgttctttgttccagctaccgtattccgcgctgacatcgcctttaaattcacgactggtcgcgtgttttcgaaccatattaattgccgcagatggattacccgtcccggtcatgagtcctgtcgcgccacgcactacttctacgcgttcaaagagtgccatatcagaaagtgcgtcgcccagattccagcggctttcaaaataggtggggataccatcaaccatatagttatcgatctggaatccgcgggaataataaagagcacgatcggaatccgcctgacttttgctgatccccagcgtgttttccatcacttcgcccagcgtttgtaactgctgatcttccatccgctgctggctaacaatagtgacgctctgaggaatatcacgttgagtcatctgcattttggtacccgcagaggtagacgttacgctgtaatcattttcgccatcatctggagctgtggcactaccctcaacaatcaccgtttcttcagtggctggtgcagcaaaagcggcagaaggtaatagtgccagtgctatgcaaccggcaagtagactcggtttggtgatggcttgatattgattatccctgttaaattgtgtactaagcatttgaaatctcttggtttatgttgtcgtcaggctcatgccggaggagggtgatgagcgattatatttagtgtgcgaataattttgtttgtaaatgcaaatgagaaatatacgcattcatatttgtcatgtaaaccaaacagagaatgtcttttcagcgcattcgcaggcagaaatgggaataatggcgatatatacggcagcaaaacgattttttgcttaagaaatcgtgagttaaggttgaaagagcaggtttaactcgaccatactctatactcgcagtgtggcgcggcgtagcatggcgcaacgcatggctatttgaaaaaggaaaatgtcgtggcagaagaaactatattcagcaaaattattcgtcgtgagatcccctccgatatcgtctaccaggatgatctggtaacggcgtttcgcgatattagcccgcaagcgccaacgcatattctgatcattccgaatatcctcattccgactgtgaacgacgtcagtgctgagcatgagcaggcgctgggacgcatgatcaccgtagcggcaaaaattgctgagcaagaaggtattgccgaagatggctatcgtctgatcatgaataccaaccgccatggcggacaagaggtttaccacatccatatgcacttgttgggtggccgtccgctgggaccaatgctggcgcataaaggtctgtaacgatgagaaaaggatgctttgggctggtgtctctggtgttgttactgctggtgggctgtcgtagtcatccggaaattccggtgaatgatgagcaaagcctggtgatggagagttctttattggctgcgggcatcagtgcagaaaagcccttccttagcacgtctgatattcaacctagtgcatccagtacgctttataacgaaaggcaagaacccgttaccgttcattatcgtttttactggtatgacgccagagggctggagatgcatcctctggaaaggccacgcagcgttaccattcccgcacatagcgcggtaacgctgtacggcagcgccaattttctgggggcgcacaaagtcagactttatctatatttgtaaggggtgaatcttgatgacaaaaatgagtcgctacgccttgattaccgcgctggcgatgtttctcgccgggtgtgtggggcaacgtgaacctgcaccggtagaagaagtgaaaccagcgccggaacaaccagccgagccacaacagcctgtccccacagtgcccagcgtgccgacgatcccgcagcagccaggcccaattgagcacgaagatcaaactgcaccgcctgcgccgcatattcgccattatgactggaatggcacaatgcagccgatggtcagtaagatgcttggggctgacggggtgactgcgggtagcgtcctgctggttgatagcgttaacaaccgtactaacggtagcctgaatgccgcagaagcgaccgaaacgctgcgaaatgcgctggctaataacgggaaatttaccctggtttccgcccagcaactgagcatggcgaagcaacagttaggtttgagcccgcaggacagtttaggcacccgtagtaaagccataggcattgcccgcaatgtcggcgctcattacgtgctgtactccagcgcctctggcaacgttaacgctccgaccctacaaatgcagctgatgctggtgcagacgggcgaaattatctggagtggtaaaggtgccgttagccagcaataagtaaaattatctggtcaggtaaaggtgccgtttcgcagcaataatcccatcacgcgcgacgaattgctgagccgctttttcccgcagtatcatcccgtcacgacgtttaatagtgggcttagtggcgggagttttctcattgaacatcagggccagcgttttgttgtgcgtcagccgcacgatcctgatgcgccgcagtccgcgttcttgcgccagtatcgggctttaagtcaactacccgcatgcattgcaccgaagccgcatttatatctccgtgactggatggtagtcgactatctgcccggcgcggtaaaaacgtatttgccggataccaacgaactggcaggcttgctgtattatctacatcaacaaccacgttttggctggcgaataacgctgttgccgttactggaactgtactggcagcaaagcgatccggcgcggcggacagtgggttggctgcgaatgttaaaacgtctgcgcaaagcgcgggaaccacggcctttacgcttaagtccattgcatatggatgtccacgccggaaatttagtgcatagcgcgagtgggttaaaactcatcgactgggagtatgccggagatggtgatatcgcgctggaactggcggcggtgtgggtggaaaatactgaacagcaccggcaattggtcaatgactatgccactcgcgcgaagatttatccggcgcaattatggcgtcaggtcaggcgatggtttccctggctgctgatgctcaaagcagggtggtttgagtaccgctggcgacaaaccggcgatcaacaatttatcaggctggccgatgacacctggcggcagctattaataaaacaataaggagagcagtgtgggtccagtaatgttggatgtcgaaggttacgaactggacgcggaagagcgtgaaatactggcgcatccgctggtgggagggctgattctctttacgcgtaactatcatgatcctgcccagttacgtgaactggtgcgccagatccgcgcagctagccgcaatcgtctggtggtggcggttgatcaggaaggtggacgcgtgcagcgttttcgtgaaggttttacccgcttgccagcggcgcaaagtttcgctgcgctgagtggaatggaagagggtggcaaactggcgcaggaggcaggttggttgatggccagcgaaatgatcgctatggatattgatatcagctttgcgcctgtgctggatgtcgggcatatcagcgcggcgattggcgagcgttcttatcatgccgatccacaaaaagccctggcaattgccagccggtttattgatggtatgcatgaagccggaatgaaaacgaccgggaaacacttcccaggacacggtgcagtaacggcagacagtcacaaagaaacaccgtgcgatccacgtccacaagcggagattcgcgctaaagatatgagcgtcttcagttccttaatccgcgaaaataaactcgacgccattatgcctgcgcatgtgatctacagtgatgttgatccgcgtccggcgagcggttctccctactggctgaaaaccgttttgcgtcaggaactgggttttgacggcgtgattttctctgacgatttaagcatggaaggtgccgcgattatgggcagttatgccgaacgcgggcaggctagtctggatgcgggttgcgatatgatcctggtctgcaataatcgtaaaggggccgtcagcgtgttagataatctgagtccgatcaaggcagaacgtgttacacgtttgtatcataaaggtagttttagccgacaggaactgatggacagcgctcgctggaaagcgatcagcacccgtctgaatcagttacatgaacgctggcaggaagagaaagcaggtcactaaccctggcttatgtgaggaagcgatgattatctatttacacggttttgactctaacagtccgggtaaccacgagaaagtcttacaattgcagtttattgacccggatgtacgcttgataagctacagtacgcggcatccgaaacatgatatgcagcatctgcttaaagaagtggacaaaatgttgcaactgaacgttgacgagcgtccgctaatttgcggcgttggcttgggcggatactgggcggaacggattggttttctttgcgacatccgccaggtgatcttcaaccctaatttgttcccttatgagaacatggaaggcaagattgatcgcccggaagagtatgccgatattgccactaagtgtgtgaccaacttccgtgagaagaatcgcgatcgttgcctggtgattttgagccgtaatgatgaagcgcttaacagccagcggacatctgaagagttgcatcattattacgagattgtctgggacgaagagcagacgcacaaattcaagaatatctccccgcatttacagcgcattaaagcgttcaaaaccctcgggtaaatgccctcgtcgcatcaggtaaccttgccggtacctgatgcgctccgaattctgtgggtcggataaggcgtccacgccgcatccgacagtcgagcatcaatgcctgatgcgcttcttatcaggcctaccgaacgccctgcatacacccctcactctatatcactctcacaaattcgctcaaataataaacaataaactctgttttttgatctcacccggtaaagtcgcctatcttttcagcaacaaaacttgattaacatcaattttggtatgaccaatgcaccattcatgttattctcaatagcgaagaacattttcattgctgtaacctgttgttaattaagagctatgttaataaccattaattaacaattggttaataaatttaagggggtcacgttgactacgccattgaaaaagattgtgattgtcggcggcggtgctggtgggctggaaatggcaacacagctggggcataagctgggacgcaagaaaaaagccaaaattacgctggtcgatcgtaaccacagccacctgtggaaaccgctgctgcacgaagtggcgactggcagccttgatgaaggcgtcgatgcgttgagctatctggcccatgcgcgcaatcatggtttccagttccagctgggttccgtcattgatattgatcgtgaagcgaaaacaatcactattgcagaactgcgcgacgagaaaggtgaactgctggttccggaacgtaaaatcgcctatgacaccctggtaatggcgctgggtagcacctctaacgatttcaatacgccaggtgtcaaagagaactgcattttcctcgataacccgcaccaggcgcgtcgcttccaccaggagatgctgaatttgttcctgaaatactccgccaacctgggcgcgaatggcaaagtgaacattgcgattgtcggcggcggcgcgacgggtgtagaactctccgctgaattgcacaacgcggtcaagcaactgcacagctacggttacaaaggcctgaccaacgaagccctgaacgtaacgctggtagaagcgggagaacgtattttgcctgcgttaccgccacgtatctctgctgcggcccacaacgagctaacgaaacttggcgttcgcgtgctgacgcaaaccatggtcaccagtgctgatgaaggcggcctgcacactaaagatggcgaatatattgaggctgatctgatggtatgggcagccgggatcaaagcgccagacttcctgaaagatatcggtggtcttgaaactaaccgtatcaaccagctggtggtggaaccgacgctgcaaaccacccgcgatccagacatttacgctattggcgactgcgcgagttgcccgcgtccggaagggggctttgttccgccgcgtgctcaggctgcacaccagatggcgacttgcgcaatgaacaacattctggcgcagatgaacggtaagccgctgaaaaattatcagtataaagatcatggtagcctggtaagcctgagcaacttctccaccgtcggtagcctgatgggtaacctgacgcgcggcagtatgatgattgaaggacgaattgcgcgctttgtatatatcagcctataccgaatgcatcagattgcgctgcatggttactttaaaaccggattaatgatgctggtggggagtattaaccgcgttatccgtccgcgtttgaagttgcattaatcgacgtacactggcggatgtggcataaacgcctcatccgcccttgaggaacagcgcgatcggcagccgcgttgtatcaggcatcctttcagactcctccgaatccttaagtatttccagccattcccgcgcttttcatcttctgtctgatagctgcttttctccttcgcttgcatgattggcataactgcaaagaaggaggtgttcccgtaaataaaagtatgttggcgggtatcgggattggtgtcgcagctgcgctgggcgtagcggcagtggccagtctgaacgtgtttgaacggggcccgcaatacgctcaggttgtttctgcaaccccaatcaaggaaacggttaaaacaccgcgtcaggagtgtcgcaacgtcacagtgacccatcgtcgaccggtgcaggatgaaaatcgcattaccgggagcgtgctcggcgctgttgctggcggcgtgatagggcatcagtttggtggtggtcgcggtaaagatgtcgccactgttgtgggggcgctgggtggtggatatgccggtaaccagatccagggctctctccaggaaagcgatacttacacgactacgcaacagcgttgtaaaacggtgtatgacaagagtgaaaaaatgctcggttatgatgtgacctataagattggcgatcagcagggcaaaatccgcatggaccgcgatccgggtacgcagatcccgctagatagcaacgggcaactgattttgaataacaaagtataacaaggctgtactctgcaatttggcccctcattcgctcaggctgaggggctttttttgcgacttatttcaccagttcgggccataaacgcaaagtcgttccggcaatctgcatcagtttttccaggcttgcaccttcgcgtgcgctgatgctcatcccctgaataatacaattaaggaattctgccagatgtgtcacgtcacagtggggcgggatttccccgcgcgcttgtcgttgacataaaaactgctgcaaagtgcgctcttgcatcgcatggcgacttttcaacgtattggcgatatctccactatctggggagagggtggtgcagttgttgatcatgaagcagcctgccggggtgtctttgctggtaaagcagttggcgatggcagcaaaatagtcagccagcgcagactccacgcttttctcttcacaaaacagctgtgcttcatgcttagcggcaaaacgatcgatatagcggtcgagaacggcacgaaataacccctctttgttggtaaattccgcgtatagcgtgggcgctttggctccggtcgcttcgacgaggtccgcaagagaagtcgcttcataaccgtgttgccagaacaatttcatggccttatcaagcgcggcatccctgtcgaacacttttgggcggccacggcttttttttacacattgtgtactgtcagttgccatgatgccgttgtacctggtgactgtgaatgaaaggttattataaaaataatcacctccgttcaccagtccagatcccataaaaataattgctttctatttaactgaaatttaaagatttttaaattaattaatgattgttataaaaaatatcttgtatgtgatccagatcacatctatcatttagttatcgatcgttaagtaattgcttgcgacgtcattcatctgcataaggccactattatgaaaaacgtaaaaaccctcatcgctgcggcgattttaagctccatgagttttgccagctttgcggctgtcgaagttcagagtacgccagaaggccaacaaaaagtcggtacaatcagtgctaacgcggggacaaatctgggaagcctggaagagcagctggcgcaaaaagcggatgagatgggcgcaaaatctttccgtattacttctgtaaccggtccgaataccctccatggaacagcagtaatttataaataagcattaaccctcattaatgcctgctactgctgattttttccccgcgacatgccgtgtcgcggggatttttttatccgggctttacagcgtttgtgggctcacttgatgacggcggacatccaccggcatcccggaacggacatccatcacatgttgcatcacttcagcgtcagtttgtgctgcatctttaaaactttgcattgcgctattcagcgtaattggcagcagctgcggatcgtcatcaatcttctcactcagcggctgatgtacttcaaccagacgcgcaccgtttggttcggcagagacttttatcggagtgttgatgatattcactttggtgcctggggtgacctggctaaagagtgttttgatatcgtcatcccgcagacgaatacagccagaacttacccgcatgccaatgccgaaatcggcgttcgtaccatgaagcaaataaacgccgccataggccgccagacgaatcgcatgatggcccattgggttatccagtccagccggcactaccgcaggcaactcaattccctgtgctttataacgggcgcggatgtttgccgttggcgtccaggttgggtttgcacgtttgtcactaacggtggtcaccattgtcggtgtcagcgtgtcaccacctaactgaccaatacctattggatacacggttacgctatttttacccggcgggtagtaatagagacgcagctccgcaatgttgatcacaatgccttcgcgcggcgcatctggaagtagggtttgcaacgggatcgttaacacgctgcccgcgcgcggtacgtaaggatcaacgccggggttagcctgtaacagagcgagaaagccgacgttgtattttttggcgatggcttccagagaaccaccgtcattttccaccacatgaaatttgttttcgccaaccagacgactgcccgctggcggcagcggccaggtgttggcttttgccggtagcgccagcgccacggcagcggcgaacgtaaaaaacgttagccagcgagaaaaacgcgttttgatcatcaccaaaaatccataataaatataaggttattgtaataaacagataagcctgaattatggatggtgacagtgtcggatagtgcagggaagtgcaaagaatttgtaaatgttgcagatgggggcgcagaaacgcccccgatttaccattaagcgatcgcgttctcttccagttcacgcataaactggcgtacccattcgatacgcgttttccgctcactcaaatcctgaataaatttcaggcgcgtcggaccatcaaggcggtaatgctgcggctgtttttgcagcaaaccaatcaaccaggccggattaacgtgattcttctcggcaaattcgatcaccccgcctttctcattaccttccagcttcctgatccccagtttctgcgcttgctggcgcagacgggcaatatccagcagggtacgcgccggatctggcagcaggccgaagcgatcgataagctcgactttgatctcttccagttcgttttccgttttggcgctggcaatacgtttgtagaagctcagacgcgtgttcacgtcagggatgaaatcatctggcaataggctcggcatccgcagctcgacttctgtttgctggctggtgagatcttccaggctcggctcgcgtccggctttcagtgcatcgacggcgttttccagcaactccatatacaggctgaaaccgatggtttccatactgccgctttgttcttcgccaagcagttcacccgcgccgcgaatctccagatcgtgcgttgccagcgcaaaacctgccccgagatcttccaggctggcaattgcttcaagacgtttttgtgcatcggtagtcatcgcttttggatgcggtgtcagcaaccatgcatatgcctgatgatggctacgtccgacgcgaccgcgtaactggtgcagctgcgccagaccgaagtgatccgcgcgttcaatgataatagtgttggctgtcgggatgtcgatcccggtttcgataatggttgtacaaaccagcacgttgaaacgttgatgatggaaatcattcatcacccgttccagttcgcgctcgcgcatctgcccgtgaccgatggcgatccgcgcttctggcaccagttctgccagccgttcggcggctttctgaatgttttccacatcattgtagagataataaacctgtcctccgcgcaaaatttcacgcaggatcgcctcccggaccaccatgctgtcatactcacggacaaaggttttaactgccagacgacgggcgggcggcgtggcgataatgctcaggtcacgcattccgctcattgccatattcagcgtacgtgggatcggcgttgcagtaagcgtcagaatatccacgttcgcgcgcatcgctttaatgcgctctttatgacgcaccccgaagcggtgttcttcatcgacaatcagcaggcctaaatctttaaacttgacgtcactttgcagcagtttgtgcgtaccgatcagaatatcgattttcccttccgccacttccgcaaggatttgcgtctgctctttggcgctgcggaaacgggagatcatttcgatacgtaccggccagttggcgaaacggtcgcggaagttgtcgtaatgctgctgcgcgagaagggtggtaggcaccagcaccgccacctgcttgtggttatctactgccaggaaagctgcgcgcatcgccacttctgttttaccaaagccaacatcgccgcacaccagacgatccattgccagcggctgacacatgtcgctaagtaccgcattaatggcctgcgcctgatccggcgtggtttcaaacgggaagctgtcgcagaacaactgatactgctcacgatcgtgtttaaacgcgaagccctctttggcggcgcgttgcgcgtagatatccagcaattccgccgccacatcacgcactttttccgccgctttctgccgcgcgcgactccacgcatcgccgccaagtttatgcagcggggcgttttcttccgcgccacctgcgtaacggctaatcagatgcagactgctcaccggaacatacagtttggcgtcgttggcataggtgagcatcagatactcgccagtaatgccacccgcttccagcgtggtcattccggcataacgaccgacgccgtgctccagatggaccaccggctgaccaatatgcagttccgcaaggttacggatcagtgtatcggggttgatggtgcggcgagaatcctgacgacgacgggcaacgcgttcaccgagcagatcgctttcgcaaatcagcgccagattacgcaccgtatcgacaaaaccatgttcggcagcgccaatcatcagataacgcccacggtcgctggcttcatcaagacgcataatgcgttgcggagcaattttaattcgtgcgagcagttcacccagcgcttcacggcgaccttcactttctacgctgaacaccaccggaccgtcgaaagtctcgaggaacttacgcagcgcatccagcggcgctttttgttgtgcctgaacggccaggtctggcagtttctggaaacctaaattggcattcgcggcttttgtcggtaaatgttcagtttttagctgcacccggggccagtttttcagctcactgaagagctcgtccacccgcagccagaggctttgtggtggcaacagcgggcgcatcggatcgacgccgcgattctcaaaacgcgccagcgtgtcagcctggaaacgttcggcactggtttccagatcgccagtattcacgagcaaggtattggcagggaaataactgaacagcggcggcagtggttcgctgaagaacaatggctgccagtactcgatcccggcaggtaatgtgcctttactcacttgctggtaaatatgttctggatcgcgcttcacttcgaaggtatcgcgccactggctgcggaacagttcaattgccgctttatcggtcggaaattcgtgcgcgggcagcagattgatcgcttctacttcctccagcgtgcgctggctgtcgacgtcaaacacccgcaggctgtcgatttcatcatcaaagaaatcaagacgataaggcagctcactccccatcgggaagagatccagcaacgcgccgcgcgtggcgtattcgccgtgctccatcacctggtcaacatggcgataaccggcgctgtccagttgggttcgtaatgcatctcgactcaggcgctgaccttttttcatcaccagcgcatgaccgtggagaaaactgtgtgggcaaacgcgctgcataagcgtattcaccggaacaatcagtacgccacgctgcatcgtcggtagctggtaaagggtggaaaggcggctggagataatgtcctgatgagggctaaaactgtcgtagggaagagtttcccagtccgccagattcatcaccatttgatcggtaaactggctgatttcatcatgcaaacgcagagcattttgcatatctggtgcaatgagtaccaccggaccggcgtgacgttcggcaatttccgctaccagcgttgcacaggctgcgccggttaactcgcccagcagacgctgctcacccgctttgacgggcagcgtataacgatattgttcaggcataacggttgtcagattctcgttaggatatgcctcaacatatgggggcatatctctgataagcaatgctgttcattatccgtaatcgacatggtttagcaaattgaatcgccccggctggggcgatggcttagcgggagtaactgacggcagcgggcagactaggcggggagaacaacagatcgctgaatgcacgctgactaagttttcttaccagcaagcccgcaacagtacagatgaacaaactgacaaagggataaaccagcaggagtgtcagttcgacttgcgggctccagcgtgctgcgttcatttgcgcaagcagagttaagctgaatatttcaaccagaatgcgatgggtggtgtagatagcaatggtgttggagccaatcacattcagcaggctggtggagcgcataccgaatcgttgctcgtattgataaaacagcttcatgatcaccacaatgcttaccaggctcaacagcaggctgatagtaaacaaccaggcaccgaccgccagaacggtaagcaaagaagccatcagcagatggcggcgcaacggcacctctttaacacaggtcattattgttgcgccaaaccatgcgccaaggctgtaataaggcaaattgcggatcacactgttcattccccaccacggcgtgggaacgaaattaaccgccacactcagcagtacaaacaaggcgaatagtggcagcgccagacggctaaaaattttacataccacgaaatagacaattaacgcatacagataccacaagctggtgctggcggtgatcatcccgtgcaggaactcaccggtggaatcggcataagcggcattggaggcattgcttaaatcgcgctcaggtgccagccactggttcagcgcacttaacgccagccactgcaccacgccccaaagcgccagcacccagaagatgttccagatccgtttatcgagacaatttccccacggtacgctgtcgatatagcggcgaatcaaatagccggatataaagaaaaaaaccggcatacgaaagggggcaaggtaaagattgaaatagatccagcatttgctcaggacttcgcttaacggatgctgaaaagtggtcagatgcggataaaaggtaatgacgctgtgataaatcaccaccagacaaatacataaccctttgatctggttaatccatagctctttttgtttcatcaggacaacacgctcttttttaatttacatgcggttgatcctgcgggttatgacccgaggtgtaatgggtatctgtctgtattggatgatttttcagattaagatcaggcggcaagattgatgataaaacatggcaatttagccgattgatttacgggggcttttcagattagccctgacgatcacttacagttcagacgtttacccatcttgctttcgcttatatactcgtgtctttgctacagcaaccagacggatttcatgtaccaacctgtcgctctatttattggcctgcgttacatgcgtgggcgtgcagcggatcgcttcggtcgtttcgtctcctggctttctaccatcggcattaccctcggggtgatggcgctggtcacagtattgagtgtgatgaacggctttgagcgcgagctgcaaaacaacatccttggcctgatgccacaggcaattctctcttctgagcatggctctcttaacccgcagcaactcccagaaacggcagtcaaactggacggcgttaatcgcgtcgcacctattactaccggtgatgtggtactgcaaagcgcgcgcagcgtggcggtcggggtgatgctcggtatcgacccggcgcaaaaagatccacttacaccgtatctggtcaatgtgaaacaaactgacctcgagccggggaaatataatgtcatcctcggcgaacaacttgccagtcagctaggcgttaatcgcggtgatcaaatccgcgtgatggtaccatctgccagccagttcacgccgatggggcgtattccaagccagcgcctgttcaatgtgattggcactttcgccgccaacagtgaagtcgatggctatgaaatgctggtgaatattgaggatgccagccgtctgatgcgttatccggcaggcaatattaccggctggcgtttgtggctggatgagccgctgaaagtcgacagtttaagtcagcaaaaactgcctgaaggcagcaaatggcaggactggcgtgatcgtaaaggcgagttgttccaggccgtacgcatggaaaaaaatatgatgggtttactgctgagcctgattgtcgccgttgcggcgtttaacattattaccagtctagggctgatggtaatggagaagcagggcgaagtagcgatcctgcaaacgcaaggcttaactccgcgacaaatcatgatggtctttatggtgcaaggggccagcgccgggattatcggtgcgatcctcggagcggcgcttggcgccctgcttgccagccagttaaataatctgatgccgataatcggcgtcctgcttgatggcgcggcgctgccggtggctatcgaacctttacaggtcattgttattgcgctggtggcgatggctatcgcgctgctgtctacgctttaccctagttggcgcgctgccgccactcaacccgctgaggctttacgttatgaataagatcctgttgcaatgcgacaacctgtgcaaacgctatcaggaaggcagtgtgcaaaccgatgtgctgcacaatgtcagtttcagcgtcggcgaaggtgaaatgatggcgatcgtcggtagctctggttccggtaaaagtaccttgctgcacctgctgggcgggctggatacgccaacctccggcgatgtgatttttaatggtcagccaatgagcaaactgagcagcgcagcgaaagctgaactgcgcaaccagaagctgggctttatttatcagtttcaccacctgctgccggattttaccgccctggaaaacgtggctatgccgctgctgattggcaagaaaaagcccgctgaaatcaacagccgtgcacttgagatgttaaaagcggtggggctggatcatcgtgcgaatcaccgcccatctgaactttctggcggcgaacgccagcgtgtggcgattgcccgtgcgctggtgaataacccgcgcctggtactggcggatgaacctaccggtaacctcgatgcgcgtaacgccgacagcatcttccagttgcttggggaattgaatcgcttgcagggcaccgccttcctggtggttactcacgacctgcaactggcgaaacgtatgagccgccagttagaaatgcgtgatggtcgtctgacggcggaactgagcctgatgggggcggagtaatggcgatgcctttaagcttattaattggcctgcgttttagtcgcggacggcggcgcggcggcatggtgagcctgatctccgttatttctaccattggcattgccctcggcgtggcggtattgatcgtcggcttaagcgcgatgaacggctttgaacgcgaactgaacaaccgtattctggcggtggtgccgcatggtgaaatcgaggcggtggatcagccgtggactaactggcaggaagcactggatcacgtgcaaaaagtgccgggtattgccgctgccgcgccgtatatcaatttcaccgggctggtggaaagtggcgcgaatcttcgcgcaatccaggtgaagggcgttaacccgcaacaggaacagcgtctgagcgcattacccagctttgtccagggcgatgcgtggcgcaattttaaagcgggcgaacagcaaattatcatcggcaaaggcgtggcggatgcgctgaaagtgaagcagggggattgggtgagcattatgatccccaacagcaatcccgagcataaactgatgcagccaaaacgtgtgcgtttgcacgttgccggtattttgcagttgagtggtcaactcgatcacagttttgccatgatcccgctggcggatgcccaacaatatcttgatatgggttccagcgtgagtggtattgcccttaaaatgacggatgttttcaacgccaataagctggtacgcgatgcgggtgaagtgaccaacagctatgtttatattaaaagctggattggtacttacggctatatgtatcgcgatatccaaatgatccgcgccattatgtatctggcgatggtactggtgattggcgtggcctgtttcaacatcgtctccaccttagtgatggcggtgaaagacaagagtggcgatatcgcagtattaagaacgctgggggcgaaagatggtttaattcgcgccatctttgtctggtatggattgctggcagggctgttcggcagcctgtgtggtgtgattatcggcgtagtggttagtctgcaacttaccccgattattgagtggattgaaaagttgatcggtcatcagttcctctccagcgatatctattttattgatttcctgccaagcgaattgcactggctggacgtcttctacgtactggtcacagcattgttgctgagtcttttggcaagttggtatccggcgcggcgcgccagtaatattgaccctgcgcgagtccttagcggccagtaaaggcagtacattaaaacaaggagcggcaatgtattacgggtttgatattggtggaacaaaaattgcgcttggcgtgtttgatagcggtcggcagttgcagtgggaaaagcgggtgccgacaccgcgtgacagctatgacgcatttttagatgcagtgtgtgagctggtagctgaagctgaccaacgttttggctgtaaaggttctgtcggcatcggtattccgggaatgccggaaacagaagatggtacgctgtatgccgccaatgtccccgctgccagcggtaaaccgctgcgtgccgacctgagcgcacgtcttgatcgcgatgtacgccttgataacgatgccaactgttttgcccttagtgaagcctgggatgatgaatttactcaatatccactggtgatggggttgattctcggcaccggtgttggcggcgggctgattttcaacggcaaaccgattaccggtaaaagctacattaccggcgagtttggccatatgcgtctgccggttgatgcgttaaccatgatggggttggatttcccgttacgccgctgcggctgtggtcagcatggctgcattgaaaattatctgtctggtcgcggttttgcgtggctgtatcaacactattatcatcaaccgttgcaggctcccgaaattattgcgctttatgatcaaggcgatgagcaggcaagggcgcacgttgagcgttatctggatttattagcggtttgtctgggaaatatcctgaccatcgttgaccctgacctggtcgtcattggtggtggcttaagcaatttcccggcaatcacaacgcaactggcggacaggctgcctcgtcatctcttacctgtagctcgtgttccgcgcattgaacgcgcgcgccacggtgatgcgggaggaatgcgtggtgcggccttcctacatctaaccgattaaacaacagaggttgctatgctgagccgtcggggtcatcggttaagtcgttttcgtaaaaataaacgccgcctgcgcgagcgtttgcgtcagcgtatttttttcagagataaagtggtgccggaagcaatggaaaaaccaagagtactcgtactgacaggggcaggaatttctgcggaaagtggtattcgtacctttcgcgccgcagatggcctgtgggaagaacatcgggttgaagatgtggcaacgccggaaggtttcgatcgcgatcctgaactggtgcaagcgttttataacgcccgtcgtcgacagctgcagcagccagaaattcagcctaacgccgcgcatcttgcgctggctaaactgcaagacgccctcggcgatcgctttttgctggtgacgcagaatatcgacaacctgcatgaacgcgcaggtaataccaatgtgattcatatgcatggggaactgctgaaagtgcgttgtagtcaaagtggtcaggttctcgactggacaggagacgttaccccagaagataaatgccattgttgccagtttccggcacccttgcgcccgcacgtagtgtggtttggcgaaatgccactcggcatggatgaaatttatatggcgttgagcatggccgatattttcattgccattggcacatccgggcatgtttatccggcggctgggtttgttcacgaagcgaaactgcatggcgcgcacaccgtggaactgaatcttgaaccgagtcaggttggtaatgaatttgccgagaaatattacggcccggcaagccaggtggcgcctgagtttgttgaaaagttgctgaagggattaaaagcgggaagcattgcctgatgcactacgcttatcaggcctgcaaggggacgcaattaattgaatttgcgggttttgtgggccggataaggcgttcgcgccccatccggaataatacacgcgcacttttccggcctcttttatcgtttactcgtcaataacaatgcggcaataaacgtacagacaccaattagccctgcccagagtgggcttattctggtaatcgcaaagctattatcgatatacaaacataaagcctgataacccatattggcaatagtcatcgccactgcaaattttaacgcataaataaaacgagtcgtgtagtaaaagatcctggaaaataagataaacgtcgcagcccaggcgataaaacctaatgtgttggtgctgccggggggagcattttcatgctgttgtcctggatgcggataatacgttagtggcggcgtgctttgttttaatatctgtgcttgtagaacagccaatgcattattgattccctgataccagagatctgcatttaaataagccagcgtgtgattttctatcagaaggccgagatgtttatcgtccagaccactttcaacctggccgttggtgatcataattaaccgtggttcgcgggtagtaaatagtaacagaacacttccttttacatcactcaaactagaactcgcatgcgccagcatcgctttaccattttgtctgagactggcttcattattaatgtcgggtaaaaccacaataaacggtgcaattcccgtttgttggcgaaaaagctcggctttatgcgcgatctcttcagcatctggtacagtaccggtaacgtccgtaaaaagtgtcttcattattggaattaatggcttgctggctgctgtcagaggcaggagtatcagtaaactgagcagtataatgaattttttcatgggcgggacttccgtttcctgcgactttttttagaggagggcatacttattaataaaccgacggcgataaaaataacgcccataatgccgataaacccccatttaaaaaaattaacccacgggttatttatctcagccttttcaggatgcccgggagaataataaacattaactttatcgccttcgctgtcttcataaaaatcgctgccgatactgctattgaaaattagcgtgtaatctggcgtcggtcgaaaggcaacgacgggataccagctaccatctttacccgtgcgatgagaatgactggagtgccagacggtatcaacaatgacgccttcggtatgaatcgcgtctttgctataggtgaactggttataaaagacaacaacagaaatgaggatcagtaccagaccgataccgaggaatatacgaaagaaaactttactgtcctgactcattagccacatccttgctaactaaaaaacgggcggtaataccaccgcccgcttgctgaattaacgtcctgctttcagcttctgataatactcttcataaatgctgctggctgcgccaacgtcattctgccattcgccatttttaatggtttcagcatccgggtagagtgttttatcgttcgccacttctggacttaacagcttacgcgccgcaaggtttggcgttggataaccgatagtttcagcaacctgttttgccacatccgggcgcagcaggaagttgatcaatttcagcgcgccttctttgtttttggcatttgccgggatcgccaggctgtccatccagaaaatgccgccttctttcggccacaccacgtcaattggcgtacccgcctggcgtgcaacgaaagcagaaccgttccagatcatgccgaggttaacttcgccttccatgtacgggttcgccgggttatcggagttaaaggctgccacgtttggcatcagttttttcagctcgttatatgcagcttcaatctctttcggatcggtggtgttaccggagtagcccagcttacgcagcgccatctggaacacttcacgggcatcgtcggtcaacagcaggctgcctttgtactctggcttccacagatcggcccagctggtgacagatttcggatccaccgcatcaccgttaacaccaatcgccgtcgcaccccagatatacggaatggagtagtcgttattcgggtcaaaaggcttgttgagcatgtctggatcgagattgctgaagtttgttaacttgctcttgtcgatcttctggatcatcccttctttacgcattttatcaacgtaataggtactaggaaccaccagatcataggcaccgtctttgtatgttttcagcttggcgtacatggtttcgttgctctcgtaagtgctatagataaccttaataccggtttctttggtgaactgttcaagcagtcctggcggcacgtactcggtccagttgtagaaatacagcgtgttgttgtcatcggcgtgagcggcgctcatgcccagtgccagagcacccgccgcgagcaggtggcgactccattttttcatttaacgtcccctgtgttacctttcgttttatcacgagcaataagctggctggcaataaccatcaccaggctcagcaccagtaatatggttgccagcgcgttaacttccgggcttacgccgactttgaccatgctataaatttttaacggcagaatttcataacttggtccggtgacgaagctagaaactaccacatcgtccatgctcagggtaaagcttaacacccagcccgccgccaccgctggcattgccagtggcagaatgatttttcgcagaatggtaaattcgctggcaccgagatctttcgccgcttccagcattcgcacgtcaaaacctttcaggcggctatacaccgtcaccaccacaaatggcaggcagaaggtgatatggctgaacagcaggctccagaagccaagctgaatacccagcagcataaacagcaccagcaggctaatcgccatcacgatatctggactcatcatcaccacaaacagcattccgctaacgaacggcttaccacgaaagcgataacggtacagcgcaactgccgtcagactaccgataagcgtagcaaacgtcgcgctaaacaccgccattgttagactatgctgcgctgcctgtaacaggctgtcgttgttcatcagcaggctataccatttggtggtaaagccctgccagttgatgccaaagcggctgctgttaaaggagttcacaatcaaaataatgattgggatatacaggtacgcgtagatagcggtcataaaaccgccgcgaagcagtcgaccgatcattcgagttccaccttcttattcagcaaacgagaagcgcgccagtaaaccagcaacatcaggcccattacgatagtcagcgtaatgctggtagctgcaccaaacggccagtcacgaatattaaggaactggaccttgatgacgttaccgatcagcaggtttttcgcaccgcccatcaggtcggatacatagaacaggcccatcgctggcagcatcaccagcagacatccggcaataattcccggcatcgtcagtggaataatgatacggataaaagtctgtaacttgctggcaccgagatcgcgcgccgcctcaagcaacggcttatccagtttttcgatactggagtacagcggcatcaccataaacggcagcagaatgtaaaccagaccgataatcaccgcactgggcgtgaacatgatacggattggtgtgtcgataacgcccagccagagcaaaaactcgttgagatagcctttggtgctgaggaaaattttcagcccgtagatacgaattaaactgttggtccagaacggaacaatcagcagaaacagcagcagcggacgcaccttgtgtggcaacttcgccagaaaccaggcaaacgggtagcccagcaccaggcaggcgagggtggcgatcagcgccatattcaggctgtgcaatagcacttcaaaatagagcggatcgagcagacgcgtgtagttatccagcgtaaagaccattttgacaaaactggcgtcgtcgcgggtcaaaaagctggtgccaatgatcatcaggttgggcagaaagacaaacaacacaagccaaccgacaatagtgacaatcactacattctggaacttacttgtgttcttcatcagccagtacgacctcccagctttctacccaattaatggccattttttggtcgagagagtggtcaaagtcaggatcgtcttcattgaagaattcgctgaccatcaccatcttgccattttccagttcaacaacgctctccagcgtcatgcctttgtagttacgctcgcgaacgtaaccaatcagcccttcagcgtggttgtcgtcgttaatctcttcaacacgtaagtcttccgggcgcagcagaacatgcagtttttgccccggttcaacggcgaagttaacgtagatattacattcgcggccttcaacgttggcgcgtacgcgctgctcgtctagacgttcgatgacagtggcgttaaacatattgatttcgccaatgaagccggcaacaaacaggtttttcggctcttcgtagatttcacgcggcgtgccgtcttgctcaatgcgaccatcgcgcatcaccacaatcctgtcactcatggtgagtgcttcttcctggtcgtgagtcacaaagacgaatgtaatgccaagcttacgctgtaacgctttcagctcgttctgcatttgcttacgcagtttgtaatccagcgcactgaggctctcatccagcaacaacagacgaggcttgttaaccaccgcgcgagcaatggcgacgcgttgctgttgaccaccagagagctgatgcggtttgcgttgagcgaaggtttccaactgcaccatccgcagggcttccatcacgcggggcgtaatttcagcagcgggggttttttgcatgcgcaacccaaaggccacattttcgaacacggtcatgtgggggaaaagtgcgtagctttggaaaacagtgttcacatagcggttttccgccggaacgtgggtgatgtcctcgttatccagcatgatgcgtccggaatcaacagtttccagacctgcaatcaggcgaagaacggttgttttaccgcagccagaagggccaagcagcgtgaggaactcgccattgttgatagtcagatccagctggggaatgacctctttaccatcaaagcatttgcgaattcccgccaattgcaccagcggactaaggctactcggttgtttattcaattttttactctgtcccatgtaaacgcaacggatggcttaccgatgcggggtttgtggttaaccaccttggtgactcttaatgagggcggtaattctacggcaaaccgcttgaatcgccaatctttgttgtgaattactggcttagctttatattcattaaggtaatgctgataaatattcccgcttgcaggggtaaaagtgacctgacgcaatatttgtcttttcttgcttcttaataatgttgtcacaaaaagtgagggtgactacatggataaactacttgagcgatttttgaactacgtgtctctggatacccaaagtaaagcaggggtgagacaggttcccagcacggaaggccaatggaagttattgcatctgctgaaagagcagctcgaagagatggggcttatcaatgtgaccttaagtgagaagggcactttgatggcgacgttaccggctaacgtccctggcgatatcccggcgattggctttatttctcatgtggataccagtccggattgcagcggcaaaaatgtgaatccgcaaattgttgaaaactatcgcggtggcgatattgcgctgggtatcggcgatgaagttttaagtccggttatgttcccggtgctgcatcagctactgggtcagacgctgattaccaccgatggtaaaaccttgttaggtgccgatgacaaagcaggtattgcagaaatcatgaccgcgctggcggtattgcaacagaaaaaaattccgcatggtgatattcgcgtcgcctttaccccggatgaagaagtgggcaaaggggcgaaacattttgatgttgacgccttcgatgcccgctgggcttacactgttgatggtggtggcgtaggcgaactggagtttgaaaacttcaacgccgcgagcgtcaatatcaaaattgtcggtaacaatgttcatccgggcacggcgaaaggagtgatggtaaatgcgctgagcctggcggcacgtattcatgcggaagttccggcggatgaaagcccggaaatgacagaaggctatgaaggtttctatcatctggcgagcatgaaaggcaccgttgaacgggccgatatgcactacatcatccgtgatttcgaccgtaaacagtttgaagcgcgtaaacgtaaaatgatggagatcgccaaaaaagtgggcaaagggttacatcctgattgctacattgaactggtgattgaagacagttactacaatatgcgcgagaaagtggttgagcatccgcatattctcgatatcgcccagcaggcgatgcgcgattgcgatattgaaccggaactgaaaccgatccgcggtggtaccgacggcgcgcagttgagctttatgggattaccgtgcccgaacctgttcactggcggttacaactatcatggtaagcatgagtttgtgactctggaaggtatggaaaaagcggtgcaggtgatcgtccgtattgccgagttaacggcgcaacggaagtaagcgaaaagggatgcggcatgtgatgccgcatccggcttaaatccaaacttacccttcgaagaaccaatacccgctattgaccagcgccgcgagcatcgcgaggaaactcggatcttccagcgcatcgccaaaattctccgcagtcagcgcaatgttgctggcgagtgcatccagtgccggacggtgcggggaatcgatcttctcaccattggcatacacgtcgtcgccaatgcgcaatacgcgcagaccacccaggcgcaccagcacttcaccttgtttcagcgcatcgtagatttcatccggctgataaggcggctctggcggcgcgatatccagttcatgacgactctgggatataaactcgccaaaccattgcttaaagtgttccggctggttgatcaattcgagcatcatctcacgcagtttatccatctcttgcggcagaacatccgcaggatgagcgcgaggtggaacatccggatcgctgtagtagttgccgcccagttcacgttgcagcacataatcggcaaatccactaatcagttcccgcgtatttggcgcgcgaaagcccacggaatagttcatcgcattttccagcgcgtagccttcatgcgggaatcctggcggaatataaagaatatcaccaggctccagctcttcatcgatgatggcttcgaacggatcgacctgtaacagatccggatgtgggcagtgctgtttcatttgcagcttttcgcccactcgccagcgacgacgtccggtaccctgaatgataaacacgtcgtactgatcgagatgcgggccgacgccgccgccgggtacagaaaaagaaatcatcagatcatcaatacgccagtccggtagttcacggaacggtcgcatcagcgcggcggtcggctcatgccagtggttcactgcctgtaccagtaaactccagttggtttcaccgagatgatcgtagctttcgaacgggccgtggctgacctgccatttgccatcctggtgactgaccagtcgactgtcaacttcgctttccatcgccagacccgccaactcgtctggagagatcgggtcaataaaattattaaagccgcgttttaacaccaccgggcgtttctgccagtgacgttcaagaaaatcgggccagttaagagtgagttggtattccatgttaagcatccacaggctggtatctgcaaccgattataacggatgcttaacgtaatgcgtgaagtatgggcatatttattcatctttcggcgcagaatgctggcgaccaaaaatcacctccatccgcgcaccgcccagcatgctctctccggcgacgattttaccctcatattgctcggtgatttcgcgggctaccgccagccctacaccttgcccagggcgtaaagtatcaacccgttgaccacggtcgaaaatgacctctcgcttgcttaatggaataccggggccatcatcctcgaccacaatatagagatgctcgtcggtttgccttgcagaaatttcgacaaactcgaggcaatatttacaggcattatccagcacgttgcccatcacctcgacaaaatcgttctgctcaccgacaaagctgatctctgggctaatatcgagagagatattgacccctttgcgttgatacactttgttcagcgcactggtgagattgtccagcagtggggcgaccggatgcagctcgcggctgagcaatgtcccgccgcgcatactggcacgatgcaggtagtagccaatttgctgactaatgcggctgatttgctccagcattaccggctcagcatcactgacgctcatcttttcactacgcagagaacgcagcgtactttgcagcaccgccagtggcgttttcagactatgggtcaggtcggtgagcgtcgtacggtatttgtcgtaacgttcgcgttcactttttaacaatcggttcaggtttcgtaccagactggtcagttctcgcgttgtggctggattgagcaattcgcggttatgttcttccagttcgcggacttcttttgccagggcttcgatggggcgtaaactccaccaggcggcgacccacagcagcgggatcactaacagcagattggcactgagcacatagataaaccagctccagaccatataggaactttttagctccaccggaatggtatccaccaccacaatggttaattttggcatccggcttgttgccgggtagacgtttactgccacgctgtgggtcatctccgcgtcgtcatcatcttcccgcacttcctgcaactgttgctgtatgctatgatctccactcagcaagaggctggtatcgttaacatccgcttcaatttcatgaaaaccattgcttttcagccagtcaggctggatcatcttcatcagccagggcacgtcacgttgcgcccataaaagctgcccgttctcatcataaattagcgtcatggtggggctttgcttgtcgatattttcgggtaactcgacatgcaacttattgttttcccacttcgcaagggtatagaacagattgctctcgccacgtaacagccgaaacgtagttttatcgaaactgacgctataaccgatcagcgcgaccattccgtaggcaaggctaagcaccagtactaccgctgccgttgccaacagaaaacgtacccgcaggctgagcgggaaaaaaagacgcagtaattttttcatcagcgcaattcgaacagatagccctggccgcgaacggtggtaatcacttcttggggatattgtgcctgaatttttttgcgcagacgtcccatcagtacatcaatggtatggctttcccgcagctccgcatccggatagagttggagcattaagctatctttgctgaccactttgccattattgcgtatcaacgtttccataatagtgtattcgaacgcggtcagtttgatcacttcgtcattaatagataattcacggcgagagagatcaacctgaaacggggggaggctaatgacctgactagccagaccgctattacgccgcattaatgcctgcattcgcgccatcacctcttcaatatgaaacggtttagtcacataatcatcagcaccggcacttaatacttcgactttgtcctgccagctttcacgggcggttaataccagaatcggcagactaacatcgttgctacgccagcggcgaatcagactcagaccgtcctcgtctggcaatccgagatcgacaatcgcaatatccggtatatgttcattgagataataatcggcttctttggcatcttctgcgtcatcgacctgatgaccagcatcctgaatctgaactttaaggtggtgacgtaacaacgcattgtcttcaacaaccagtacgcgcatttttatttctccctgtcttaattattaaaatagtgtaacgcgattatgtggttatgggggtaaacattaaataaaccagcggggaggggaggtaaagtgaaaaaataaaaagcggataatcttaataagcaggccggacagcatcgccatccggcactgatacgaggtttatttcagctcatcaaccatcgtgatagctcgaccaatatagttagccggcgtcatcgctttcaggcgggctttctcttcttctggcaacgccagaccatcgataaactgcttcatgccttcggcgtcaacgcgcttaccgcgagtcagctctttcagcttctcgtacggtttttcgatgccatagcgacgcataactgtctggattggttcagccagcacttcccagttgtgatccagttcatccagcagatggtcacggttcacttccagtttgctcacgcctttcagggtggattgatatgcaatcaaggcataaccgatacccacgccgaggttacgcagcacggtagagtcggtcaggtcacgctgccagcgggaaaccggcagtttgcttgccagatgctgcaataccgcgttggaaaggcccagattcccttcggagttttcgaagtcgatcgggttaactttatgcggcatggtggaagaaccaatctcaccagcaatggttttctgtttgaagtggttaagggcgatataaccccagacgtcacggtcaaagtcgatcagaatagtgttgaagcgcgcaacgcaatcaaacagttcggcaatgtagtcgtgcggttcgatctgggtggtgtacgggttccactgaatacccaggctggtgacgaactcttcgctgaactgatgccagtcaacttccgggtaagcggcgatgtgggcgttatagttaccgaccgcgccgttgattttgccgaggatctccacctggttaagctggcggtactggcgctccatacggtaggcgacgtttgccatctctttaccgatggtactcggcgtggctggctgaccgtgggtacgagacagcagcgggatatcgcgatactgaacggcgagatctttaatgccatcaatcagttgacgccagtatggcaggatcacttcatcacgcgcggttttcagcattaatgcgtgggagaggttattgatatcttcgctagtacaggcaaagtggatgaattcagaaaccgcgtgcagttccgggatctccgccactttttctttcaggaaatactcaaccgctttaacgtcgtggttagtggtacgctcgatagttttgatgcgcgccgcatcttcttcgctgaaactggcgacgattgcatcaaggtaaccgattgcgtcggcagcaaaagcaggaacttccttgatcgctgcgtgcgcggccagtttttgcagccaacgtacttcaacttgtacacggaatttcagcaaaccatattcgctgaaaatcccgcgcagcgcgctgactttatcgccgtagcgtccatcgacaggggaaacggcggtcagactggataattccatagatcacaactccggggttaaatgagcaagaatttgttttgcctgagtggtcaggcgattacgagaaaacatcagttgcagacgtccgccgccgacctggtgccagagcacggcggcgcgaatgcctgccagcagggttgcgcgaactttcgcctgcacttgtgggctttgcagtacagcaggggaaccggtgacctgaatgcgcgggccaagcgggctaatcacatcaacatagatagcagccatcgcgctcatcagcgtttcggactgtaaatcgaagtgttcgagctggcgttgcaggccgttgatccggttgcccagagtgtcgagcgcgcctttcgcactggagagtttgcgctcaagcaccatcaagctgagtgtgtagcgggttaattcggcgtttaagccctggcgactgctggcattgagcacgccgagcagggtttccagcccgacgcgcaggttggcttcgctaccgccaaaaaccgccagcgtgctgctggggttcatatcaataatactgttgagactgacgtgtagcgcatcggcatcacaatgcccctggtgagcgagttgttgcaccaggcgtgcgctctgacaaataccggccagggcgagggtgatgtcatagtaattctttgccacgttcactgcttccttgttttaagtaaagataataatcagaccggcagcggcagacgctgctcaataataccgccaccgaggcacacttcaccgttatagaagacggcagactggcccggcgtcacggcggcaaccggttcatcgaaaatcacttcaatgcgatcatcgtccagcgccttgacggtgcaagggatatcggtctggcgatagcgggtttttaccgtgcaacgcatagtgccggtgaatggttcgcgatcgacccagtgcaactgctgggcaatcaacccgacagacatcagccgcgggtgttcatggccctgagcgacaaccagaatgttgttttcgacgtctttgtccaccacataccacggttcttcggtaccttctttggtgccaccgatacccagacctttacgctgaccgagagtgtgatacatcagcccctggtgctcaccaatttcatcgccatcgacggtaatgattttgcccggttgcgccgggagataacggcccaggaactcgcggaatttacgttcgccaatgaagcaaatgccggtagagtcttttttcttcgcggtgaccagaccaagatcttcagcaatcttacgcacctgcggtttttccagttcgccgaccgggaacaggctttgcgcaatctgctcatggctgagcgtataaaggaagtagctctggtctttattgctgtccagaccacgcagcaggcggctcttgccatcgacatcggcccgacgtacgtaatgaccggtagcgatataatcggcacctaaatcttcggcggcaaattcgaggaaggctttaaatttgatctctttgttgcacagaatatccggattcggcgtgcgaccggctttatattcggcaaggaacagttcgaagacgttgtcccagtactcggcagcaaagttaacggtgtgcagttcaatgccgagcttgtcgcagacagcctgggcatcagccagatccgctgccgctgtgcaatattcctcaccgtcgtcttcttcccagttcttcataaacaggccttcgacctgatatccctgttgttgcaacagccaggcagaaacggaggaatcgacaccgccggacatgccgacgattactttttttgcggtttcagacattggatcactcacgacattgaacttcaaggcggcgtattctatcacgcagccttttagatgacaccctttgtaaaaggccagttaaaatcgccaatcatctccagcggataacgttgcccgctttgataacaacgaatactttccgccaccagcgggctacgaagattactcgcctgtaaaatttcttcggcgctgacccaacggcagcagtcgatatcgctgtcatgaggctgggtcgggcatatttgctcaagctcaatggcaaagaggaaacgcaaaaacggcgttttatctggcgcaatccactgatgcatacgaataaagtgttgcggctgcgcgctgatgccggtttcttcccacagttcacgggcggcggcttccactaaggtttcatcggcttccagatgcccggcaggttggttccataacgctttaccattaatcgtctcttcaacgactaaaaatttgccttctgcgtgcaccacgcaagcaacggtaacgtgcggtttaaacattttgcatccttaatctgtcacttctcgccattcaccattggcaagattatccaaagagtaatcacccatcgcatagcgaatcagtcgcagcgtggggaagccaacatgggcggtcatgcggcgcacctggcgattacgtccttcatataaggtgatcttcagccagctggtgggaatacttttgcgttcacgaattggtggattccgcggccataaccacgcgggttcgtcaaccagctccgcgccggcgggcagggtagggccatcatttaaggttacgccattgcgcaaggcttcaagtgcgtcttgtgtgggaataccttccacctgcacataatagatttttccggtgcgtttacccggctgggttaaacgcgcctgcaacgcgccgttattggtcagcaccagcaacccttcgctatcgcggtcaaggcgacctgctgcataaacaccctgaaccgggatgaattcttttaatgttttgcgtccggcttcatcggtgaactgcggaagaacatcgtagggtttattgaacaggatcacacgcgtgggctggttttcaggtttacgcctggtagaacgttggctgctgaatcgcttaacctggtgatttctaaaagaagttttttgcatggtattttcagagattatgaattgccgcattatagcctaataacgcgcatctttcatgacggcaaacaatagggtagtattgacaagccaattacaaatcattaacaaaaaattgctctaaagcatccgtatcgcaggacgcaaacgcatatgcaacgtggtggcagacgagcaaaccagtagcgctcgaaggagaggtgaatggaaagtaaagtagttgttccggcacaaggcaagaagatcaccctgcaaaacggcaaactcaacgttcctgaaaatccgattatcccttacattgaaggtgatggaatcggtgtagatgtaaccccagccatgctgaaagtggtcgacgctgcagtcgagaaagcctataaaggcgagcgtaaaatctcctggatggaaatttacaccggtgaaaaatccacacaggtttatggtcaggacgtctggctgcctgctgaaactcttgatctgattcgtgaatatcgcgttgccattaaaggtccgctgaccactccggttggtggcggtattcgctctctgaacgttgccctgcgccaggaactggatctctacatctgcctgcgtccggtacgttactatcagggcactccaagcccggttaaacaccctgaactgaccgatatggttatcttccgtgaaaacagcgaagacatttatgcgggtatcgaatggaaagcagactctgccgacgccgagaaagtgattaaattcctgcgtgaagagatgggggtgaagaaaattcgcttcccggaacattgtggtatcggtattaagccgtgtagcgaagaaggcaccaaacgtctggttcgtgcagcgatcgaatacgcaattgctaacgatcgtgactctgtgactctggtgcacaaaggcaacatcatgaagttcaccgaaggagcgtttaaagactggggctaccagctggcgcgtgaagagtttggcggtgaactgatcgacggtggcccgtggctgaaagttaaaaacccgaacactggcaaagagatcgtcattaaagacgtgattgctgatgcattcctgcaacagatcctgctgcgtccggctgaatatgatgttatcgcctgtatgaacctgaacggtgactacatttctgacgccctggcagcgcaggttggcggtatcggtatcgcccctggtgcaaacatcggtgacgaatgcgccctgtttgaagccacccacggtactgcgccgaaatatgccggtcaggacaaagtaaatcctggctctattattctctccgctgagatgatgctgcgccacatgggttggaccgaagcggctgacttaattgttaaaggtatggaaggcgcaatcaacgcgaaaaccgtaacctatgacttcgagcgtctgatggatggcgctaaactgctgaaatgtagtgagtttggtgacgcgatcatcgaaaacatgtaatgccgtagtttgttaaatttattaacgggagcgtaacgctcccgttgttttttgttaggctgctaacggttatcaaaattttatcaaaaaaagttatcaaaacccctcggtagttttggggtaggctggccggtcaggtggtagttctactactagtctcccacatagatattccttagctttttattattgctggcggacgctcgttaatatttaaggtcttcattgattaagacatccccaaagttagttatgtattcactgttattaggacaattatgaattaccactccttacacccgctcaaatattgttaaattgccggttttgtatcaactactcacccgggactcgccaggggacagccaacaggcattgggtgcaatcaccttagcgttcaggtacatgcggaatgtaaaaaaggccgcgagcgcggccccttcacatacatctttagtactgagactgtttaacctagggaattattatcgtattatattgcattacaactcccaacagtgacatatgaacttcctgctttactccacgactttaatatttcaaggccatgtgaagaacatatttcttgcactgcgagttcatcgagtaatccatagtaagaaacactttttgaatttttgtaaatgtatccgtaaagatgttttcttcctgtttcgtattttttgaagtatgagcttttatattgatttacaataagagtctcacctcctgattttagtaatctcttgatgctaagaactatcagataattcaaagcgtggctgtgatgataggaattatgttttttacgtgaatgagaataatcttaaatgaggaataactcattgattgacaatatttttattcaagaagtgtcattgactgttaacgcaatgttgtaaaggtaagataatctgatttatcaatattattgtgtgatttttatgtgagcagaagatattcatcagcaacgattacattagtcattttattttgccgacggcctcattgtcgaaagataagcgtacgacagtattatcagaaaagagtgattttttatccaactacacttcagcgcactgcgtgtaaaaaatgcctctttcttatgcgggatatcatcatttcatcatgatgtctttggtgagcggtgaacacaatgcacctgcgctgtctcttcaggatgaatcccctggtctggtgcctgcgggctgatgttgcagcagagcttaggagtcttagacgctactatcatttatccaatggcatggaaagcaaaagtgtcgatacccgcagtatatatcgtgaactgggtgcaacgctgagttacaacatgcgcctggggaacggtatggaaatgaaccctggctgaaggcggctgtgcgcaaagaatttgtcgatgataaccgggtgaaggtgaataatgacggtaatttcgtcaatgatttgagcggcagacgtggaatataccaggcagctattaaagccagtttcagcagtacgtttagcggacatctcggggtggggtatagccatggtgccggtgtggaatccccgtggaacgcggtggctggtgtgaactggagcttctgaccatcaacgattaaactgcgcttcggcgcagttttcgtttacaggatgttgaaagggaaaattctggggcaaaaaaagcccgccagttacggcgggaaacctcatcctatgggagaacaatgaataatgaaattgcggggttatcatctcccagtatatccatactaacaataaggttatttactcaaccaggcataaacattttgttttgtgcgtgggaacagccttaaggtgtaaagggggaggtggaaatagcaatgaggagtatcagcaagaatactcgccgctttaccacaacgtggatgagagggatgaaaaactcaaggcagagataactctgccttgaagataaatgcgcttttacagcgggcttatttcagctcttctgcttccggtaaggtcacgttcagctcaagaatagaaatatcgccatctttttgctcaagctgtacggttaccatctcaggatcaatttgtacgtatttacaaatgacctcaagaatatctttacgcaactgcggcagataatgcggttctgcatcgctgcgacggcgttcagcaacaataatctgcagccgttcttttgcaatgttggctgtgtttttcttccggctgagaaagaaatcgagtaatgccataacttatcctccgaacaagcgtttgaggaagcctttcttctcttcttcaatgaagcggaaaggacgttcttctcccaacagacgttctacggtatctgcgtaggctttacccgcatcggcgttaatgtcgagaatgaccggttcaccctggttagaggcgcgcaatacactttgatcctctgggatcacgccgacgagtttgatgcgcaggatctccagcacatcttccatgctcagcatgtcacctctgcttacgcggcctgggttatagcgcgttaacagcaggtgctctttaataggctcttcgccattttctgcgcggcgacttttgctcgccagaatgcctaaaatacggtcagagtcgcgtacactggagacttccgggttggtggtaataatggcttcgtctgcaaaatagagtgccattaacgcaccggtttcaatccctgccggggagtcacaaacgataaattcaaaatccatcgctttcagatcatcaagaactttggcgaccccttcacgggtgagggcatctttatcgcgtgtttggcttgccggcagaatatagagattttcagtacgcttatctttaattaacgcctgatttagcgttgcatcgccctgaatgacgttgacgaaatcgtaaacgacccggcgttcacaacccataatcaggtcgagattacgcaggccgatatcaaaatctatcacgacagttttctttcccttctgggccaaaccagtggcgatggccgcgctggaggttgtcttaccaacaccccctttgccgctagtaacaacaataatgcgtgccatagaaattccttgttaaaaagggatcaatttaacggttgaacggtcaaagcgttttcgactaactgcagtcgcgccgctttgccataaaattctgctgggatttgatcactcagccagtattcacctgcgatggacaccagttccgccatcaggttcgtacaaaatatttgcgtttcccggtcaccacttgcccctgccagcgcacgaccgcgcatcatgccatagacatgaatgttcccatcggcaatcaattcggccccagcgctaacgtggcttgtaacaatcagatcacattgtggagcataaatacgctgaccggaacgcaccggggtatctattaaacgcgtttttgtgaccggcgttgtattttgcgctggagcctgcggtgtgggagctggacgtggcgctttttcctttccttccgtcaggataggcagccccatcttttcaatttcggctttaagttgcgcatctttgcagccacttacgccaataacccgcaaaccggttgcgctaaccgccttatgcatcgcactccagtttaccgggtcttccagtgcactgacgttgagtacaacgggggcatgttttaaaaatgcgggggcctgagcgattttgtcttccagcgcctgatggataaccttaggttctgcctcatgcagatgaaccacagataaagtgaagctactgcctttaagctcgattggcgtgttactcatcctggccttactcaattagctattaatcatcgccagcgcgcgatgatgttccgaagactataaggcatgttatagtctggattatattgaggcaagtcaccctcccatttattcagagtaaaagtctattctgtgataaatggcgctgattcatagcttaaaaaatacccttgtcaatcaacccattgccgtcgtacttttgattgttcttatttacgcttcctttttccgcaccctaatcgtgacagcatctccagacctgtttaaatatccagtattgaggcaagtgtattttttcaccacgccaggctttcttaactttccattttttgcggcatcattaaagaacagatacccgttatcttaatatccgccacagaattgctctatcatagaaaccgcagaagacgtctgatacttctgtcaggtcatcgtaactcgtccaggtcagcggttttgattacggattgatgatgaaatgagcataagtgttgtacggttggattatcaggatgtgctatgaatatgatgcgtattttttatatcggattgagtggtgtggggatgatgttcagtagtatggcgtctggaaatgacgctggcggacttcaatctccggcgtgcggcgttgtttgcgacccgtatatttgtgtgaacagtgatggcatttccccagagttaacaaggaaatatctcggcgaaaaagccgctgaaaacttacaaagtttacaaggctacgatcccagcgaatttacattcgctaacggtgtattttgcgatgttaaagaaaaattatgtcgtgatgatcgttattttggtgtggatggtaagcggagtggaaaaatcaatcaaaccaccacaaagatgttatttatgtgtcgtgagtgatgtcttgtttacattatgttctattcgtcattaacctcttgagcgacagagaggagtggggcattaacgtttatgacggggagagtccccgtcggttgacatttacttaatttgaatatcgacgttatattttttagttttgtttttacgggcgtcgtttcgggtttgcaacactcgcagctcatatttgccagaagcagggagactgtattgtccgtgactatcgagttctggggaatatctggataaatcaacactatcatcgattcctggcccgaagaggtaagtatcagcgccttcattagagatactcacatgcactttctgaccttttttggcatagaaggtatatgtatcgtaatcgtatccctttatttcgccggagtactgagcgctgctatggccttttctgaactcaacattgacattcttacccgcagcaaagctcgtggaggttagcagtgcaagcagcaatacagccttcctgatgctcttgattttcattggtagtctcctgttcagaatgagtacgatgaactgttataatataacaatccctaacgggagaattccagtggctttcctgcgttcggtaaaatcacgttgcggcatttttgccggggggattacttataaagggggcatggactcaacaaaccgtagaaatctacagctggctggcttgtggcgcgggtttcattgatgttagcttatgccaaaacctggcatcttaaagagtaaaagtatgttttgtgtgatttatcgaagcagcaagcgtgaccagacctatttatatgtcgaaaaaaaagacgattttagccgtgttcctgaggaactgatgaaaggttttggtcagcctcagttagcgatgattctgccgctggatgggcggaagaaactggtcaatgccgatattgaaaaggttaaacaggcattaaccgagcaaggttactatttgcagttaccgccaccacccgaagatttgctgaagcaacatctttccgtcatggggcagaaaacagacgacactaacaaataaccgatatccggcggtggcattatctttgtcggcgcgggttttcatatccacgataaggtgaggggaacgttatgtatcaacatcacaactggcaaggtgcgctgctggattatccggtgagtaaagtagtctgtgttggcagtaactatgccaaacatattaaagagatgggcagcgcagtgcccgaagagccagtgctgtttattaaaccagaaacggcactgtgcgatctgcggcagccattggcgatcccatccgatttcggtagtgttcatcatgaagtcgaactggcggtgttgattggcgcgacactgcgtcaggctacggaagagcatgtccgcaaagccattgccggttatggcgtggcgctcgatctgacattgcgtgatgttcagggaaaaatgaagaaagccgggcagccgtgggaaaaggctaaagcgtttgataactcttgtccgctttccgggtttattcccgcggcggaatttaccggcgacccgcaaaatacaacgctgagcctgagcgtaaacggcgaacaacgccagcaaggtacgactgcggacatgatccataaaatcgttccgctgatcgcttatatgagcaagttttttaccctcaaggccggtgacgttgtgttgacaggcacgcctgatggcgtcggcccgttgcaaagcggtgatgagctgacagtcactttcgatgggcattctttgacaactcgcgttttgtaatactttttgccgcctgaaagcggcggcaaaacttgcatcgctgtgccagactggttataaggtgcgttttaacgtaatggcggaacacctgatgagcgatgtacctttctggcaaagtaaaaccctggacgaaatgagcgatgcggaatgggagagcttgtgtgatggttgcggtcagtgttgcctgcataaactgatggatgaagacaccgacgaaatctacttcactaacgtcgcctgtcgccagctcaatattaaaacctgtcaatgtcggaactacgaacgtcgtttcgagtttgaacccgactgcattaaattaacccgtgaaaatctgccaacattcgaatggctgccaatgacctgcgcttatcgtttgctggcggaaggtaaagatttacctgcgtggcatccgctacttactggtagcaaagcggcaatgcatggtgaacgtatctctgtgcgtcatatcgcagtgaaagaaagtgaagtgattgactggcaggatcatatcttaaataaacctgactgggcgcagtgataaatttaatagatgctgatgggggctttcttaatatacgtctggatgctcgccatttcgtagccctgtttttgaaagcgctctgtcataatgagagttacccgataccttattatcaacaggtaactctcaatctttaaaaaacgtctgtgtttttaaatgtgataaaccttataccttgagtacatggagagaataatcgcttatcagacttcaggtacctcaaagagtgtctttttaccgtgtcttttctgatactcattacaggtgttaatcatttttttggccgcttcttttagcaaagaaagcattaaatcatcataatcaacgtagaatctggttgtttcagtttccgtttttatctcaccgatggcggctatttcggtggttaatttcaatttggcggcatcgatatctttattcgcttgtttaaccgtgttagacagggtggtaaagaaattctgcacagattttaacttgttcttcaattctggaatcagttttccttcaactacgcccgcagcaatagaataggaaatgattaatccaaatggaccggcgacgacaccggctgcggcaccggcatatgcttccttcctgattttatctacctgactctggaaatagctgcttttttcactaaaatcattggttaactggctatctaacgccagcagtttcccggaagcgttgttgaaactttgactgcttaccagcagggatttttgcgcttcattcagcttcgtgatgccgtcatccagtaccttaatgagaatgtctttctgggcggatgctttcttctcattgtactcatcaaatagcaaaatatacgctgcgagcaattgcgtcgcaacaccacaccattcatacactgtttgggttgcttcaaaatacttatcctggctatccataagtaaggttttaatatcgccgactaaaacggaggctgcctgactatactcctgtttaaagcgacttaactcttttatggtttcatcaaaggtctgccaggggatgacctgatcgagatatttattataaagatctaatgctccatctgcggtttcgattgcgtttttaactacttctaccgttttatctgcaacgatttcagtcataatcattcgcctctttaaatatataaattgtaatgaaactcctgttttacaactattaataaattttacttcatctaattcatagttagccgggcgggatgcgtcaatgtctttatttctattaatatgataaatatcaaacaatgtttaatgtcattatggcgaatgcttctattctattttttagccgggtgatatttttcatttctgctggatgagcgtcgtcgccagaaggccacgtgagcacaagataagagaacgaaaaatcagcagcctatgcagcgacaaatattgatagcctgaatcagtattgatctgctggcaagaacagactactgtatataaaaacagtataacttcaggcagattattatgttgtttatcaagcctgcggatctccgcgaaattgtgacttttccgctatttagcgatcttgttcagtgtggctttcctagtccggcagcagattacgttgaacagcgcatcgatctgaatcaactgttgatccagcatcccagcgcgacttacttcgtcaaagcaagtggtgattctatgattgatggtggaattagtgacggtgatttactgattgtcgatagcgctattaccgccagccatggtgatattgtcatcgctgctgttgacggcgagtttacggtgaaaaaattgcaactacgcccgacggtacagcttattcccatgaacagcgcgtacagccccattaccatcagtagtgaagatacgctggatgtctttggtgtggtgatccacgtcgttaaggcgatgcgctgatgtttgccctctgtgatgtaaacgcgttttatgccagctgtgagacggtgtttcgccctgatttatggggtaaaccggtggttgtgctaagcaataatgacggttgcgttatcgcccgaaacgctgaggcaaaggcgcttggcgttaaaatgggcgatccctggttcaaacaaaaagatctgtttcgtcgctgtggcgtggtttgctttagcagcaattatgagctttacgcagacatgagcaatcgggtgatgagcacgctggaagagctaagcccccgcgtcgagatttacagtattgatgaggcattctgcgatctgacaggtgtgcgtaattgtcgcgatctgactgattttggcagagaaattcgcgcaacggtgctacaacgtacccatcttactgttggtgtggggatcgcccagaccaaaacgctggctaagcttgccaatcatgcggcaaaaaaatggcagcggcagacgggtggggtggtggatttaagtaatctggaacgccagcgtaaattaatgtctgctctccccgtggatgacgtctgggggattggacggcggatcagcaaaaaactggacgcgatggggatcaaaaccgttctcgatttggcggatacagatatccggtttatccgtaaacattttaatgtcgtgctcgaaagaacggtgcgtgaactgcgcggcgaaccctgtttgcaactggaagagtttgcaccgacgaagcaggaaattatctgttcccgcagctttggtgaacgcatcacggattatccgagcatgcggcaggccatttgtagttacgctgcccgggcggcggaaaaacttcgcagcgagcatcaatattgtcggtttatctccacgtttattaagacgagtccatttgcgctcaatgaaccttattacggcaatagcgcgagcgtaaaactgctgacgcccactcaggacagcagggatatcattaacgctgctacgcgatctctggatgccatctggcaagcgggccatcgttaccaaaaagcgggcgtgatgctgggggatttcttcagtcagggagtcgcgcagctcaatttattcgatgacaacgcaccgcgccccgggagtgagcaattgatgacggtaatggatacactgaatgctaaagagggcagaggaacactctattttgccgggcaggggatccagcaacaatggcagatgaagcgagccatgcttagtccacgttatacaacgcgaagttctgatttactgagggtcaaataaatatagcggcaggaaaaaagcgctcccgcaggagcgccgaatggattagcgaccgaacagatcacgttttttcgctttaaacggctgggaaatcaccaccagcactgcgacaatcaggtaagcgataaaaataccgagcagccactgcggcatttccagacctaaaaaatcccactgacgctcggcgcaatcgccagaggcgacaaacacttgcggcacccacttatccagcggcagccattccgggaaacgaaccataaaatcacaggtggcaaacgggctaggatagagctgaagcatggtgtgctcgtaagttaactgcacaccgcggaacgcactatacaaccagataaccatcgctacataacgcagcggagttttcggggcgatcgcgccaatcagcgcagcacccagaacgccgaataacgcgcagcgttcataaatacagagcacgcaaggtttcagtaacatcacatgctggaaccacagcgccgtcagttccagtgccagagcagtaaacgccatcaacagccacgcgccccggccttgactacattggttcaaaaatcgcaacataatcatttccctgcaatatgcatagagtgcgcagtttaaaccaattcattcgctgcgccaccaggaggcagcaaaaataggacgcaattggacaattatcgggcgaaaaggcaaaccgggcatttgtatgcccggtaagttgttatcaaagcgttgctatccagcccatttgcataaaccattcggttacaggggcaagcgtaaactcgacgcagagcaagccgacgagtgtcaggacgagggtgtaaggcagggccatccacaccatgcggccataagagaggcgaatcaatggcgcgagtgcagaggtcagcaggaacaggaacgcagcctgaccgttcggcgtagcgacggagggcagattggtaccggtattaatggcgaccgccagcagctcgtattgcttcaacgtgatagcgccactttccattgccgctttcgcttcgttgatataaatcgtccccacgaagacgttatcgctaatggaactcagcagaccgttgaaaatatagaacaggctcagctgagcatgttcgcttgcctgcaacacaaactgaataattgggctaaacagttgttggtcgataatcaccgcgactacgctgaaaaacaccgtcaacagtgcggtgaatggcagagattcggtgaaggctttaccgatagcatgctcatcggtgacaccggtcaaacttgttgccagaataatgacactcaaaccaatcaagccaacttccgccagatgcaacgccagcgcagtcaccagccagacgccaataatcgcctggacaatcagacggattttatcctgacgggtacgctggtggcggctttgatcgtcaaactgttgcaacacttcgcggactttctccggcagcgtttcaccgtagccaaaccaacgcagcttctctaccagcaggcaggttaacaggccacaaatcagaaccggaacggtcaccgggctcatgcgcaggaagaaatcgccaaaatgccagccagccgctttagcgatgatcaggttctgtggttcgcccaccatggtcattacgccgcctaatgcggtgccgacaccggcatgcatcatcaggctacgcagaaagccacggaactgttccagaaccactttgtaatgcttgtcgatatgactatcgtcttgcaggtcggtgtcttcggtacgggaagaggctacgcggtgataaataccataaaaaccgactgcaacgctgatcaccaccgccacgacggttaaggcatcgaggaacgcggagaggaacgcagccgccacgcaaaaagagaggctcagcagcattttggagcgaatgcttaacagcaaacgggtaaatatgaacagcaacagctgtttcataaaatagatacccgccaccataaacatcagtaacagcaagacttcaagatttgccgccacctcttcacggacgtgttccgcgctggtcatgccgatgaataccgcttcgatagccaacagaccaccggggagcagcgggtagcatttcagggccatcgccagagtgaaaataaattccgctaccagcaaccagcccgcgacgaaagggctgatgaggaaaattaacgggtttacgattaagaaaatgatgagggcgagtttgtaccagtcgggggactggcccaaaaaattgcgccatagcgcgcggccccaggagatctccatgatggtttcccttaccttacaaataatcaatgatgtttttatgtttaaacgcaaagcttaacggtcaggcaggagtgaggcaagtcttgatagtcaaggggaaagagatgcggaaaatgaagccttgatccctttttcttctttttgtctgctatcagcgtagttagccctctggtatgatgagtccaactttgttttgctgtgttatggaaatctcactatggtcattaaggcgcaaagcccggcgggtttcgcggaagagtacattattgaaagtatctggaataaccgcttccctcccgggactattttgcccgcagaacgtgaacttagtgaattaattggcgtaacgcgtactacgttacgtgaagtgttacagcgtctggcacgagatggctggttgaccattcaacatggtaagccgacgaaggtgaataatttctgggaaacttccggtttaaatatccttgaaacactggcgcgactggatcacgaaagtgtgccgcagcttattgataatttgctgagcgtgcgtaccaatatttccactatttttattcgcaccgcgtttcgtcagcatcccgataaagcgcaggaagtgctggctaccgctaatgaagtggccgatcacgccgatgcctttgccgagctggattacaacatattccgcggcctggcgtttgcttccggcaacccgatttacggtctgattcttaacgggatgaaagggctgtatacgcgtattggtcgtcactatttcgccaatccggaagcgcgcagtctggcgctgggcttctaccacaaactgagcgcgttgtgcagtgaaggcgcgcacgatcaggtgtacgaaacagtgcgtcgctatgggcatgagagtggcgagatttggcaccggatgcagaaaaatctgccgggtgatttagccattcaggggcgataatcccttccgtttaaagagcaaacccctcaaacgaggggttttttgttgtttttacagatttcccattcttggcgggcaacgttccagcaactcgatgctgccgtcttcgttttgctgttcgagcatcacatcaaatccccacaggcgatgcacatgcttcaggacttctttgcgcccccgatccagcggtgcgcgattatgtggaatataacgcagcgtcaggctacggtcgccgcgcaaatccacgttccagatctgaatattcggctccagattacttaagttatattggctgcttaaccggttacggatctcccgataaccttcttcattatgaatagcggaaatctccagataattatgccgatcgtcatccagcacggtgaagaagcggaaatcacgcatcactttcggactcaggaactggctgataaaactctcatctttgaaatcacgcatcgcgaaatgcagcgtttccagccagtcggaaccggcgatatccgggaaccagtatttgtcttcttccgttgggctctgacaaatccgtttaatatcctggaacatggcgaacccgagggcatacgggttgatgccgctgtaccacgggctgttataggggggctggaagaccacattggtgtggctgtgcaaaaactccagcataaaacgttccgttactttcccttcatcatacagatggttaaggatggtgtagtgccagaaggtcgcccagccttcgttcatcacctgagtctgtttttgcggataaaaatactggctcaccttacgcacaatacgcaggatttcacgctgccaactttccagcagtggcgcatttttctccataaaatagagcaggttttcttgtggttcggacggatagcggcgcgcttcagcaaccgttttctcttcctcgcgcttcggcagggtacgccagagcatattgacctgactttgcagatactcttcgcgacttttctgccgggctttctcttcttgcaggctgattttttgcgggcgtttgtaccggtccacgccgtagttcatcagcgcgtggcagctgtccagaagccgttctacttcatcaacgccataacgctcttcgcactcggtaatatatttacgggcaaaaatcagataatcgacaatgctactggcgtcggtccagctacggaataagtaattgtttttgaagaaagagttatgcccatagcaggcatgagccatcaccagcgcttgcatggtaatggtgttctcttccatcaggtaagcgatacacgggttagagttaatgacgatttcataggccagtccttgctgaccgtgcttatacagccgttcagtctcgataaactttttaccgaaactccagtgcggatagttaattggcatgccgacgctggagtaggcatccatcatctgttcactggttatcacttcaatctggtgcgggtaggtatccagccggtagagtttcgccacccggtctatctctgccagataaacatccagcaggtcgaacgtccagtcgggtccatcgctcaaacgtgtggtgtccttattcatagaatcgatcgtcgccatacgcgcacctcattgttgtcggcgctctctgtgtggagcacctcatttcaagcatagaacacctgttaaaaaccgcgtcgccggagaatttttttctttgcgatttcttattatcagagtgccactaatccgcttctgaacggaattttatgctggataaaaagggcgttcagcaggagatactaaagacgccatattgccgcagagtcagggagatgtgagccagctcaccataaaaaagccgcatgttgaataatattttcaactgagttatcaagatgtgattagattattattcttttactgtatctaccgttatcggagtggctatgcgagttgtcatactgggaagtggtgtggtaggcgttgccagcgcctggtacttaaatcaggcaggacatgaggtcaccgtcattgatcgggagccgggggccgccctggaaaccagtgccgcgaatgccgggcaaatctcccccggatatgctgcaccgtgggcggcaccaggtgtgcctttaaaagcgattaaatggatgttccagcgccatgcgccgctggcggttcgtctcgacggtacgcagttccagttgaaatggatgtggcaaatgttacgtaactgcgacaccagccactacatggaaaacaaagggcggatggtgcgtctggcggaatacagccgtgattgcctgaaagcattgcgcgccgaaaccaatattcagtatgaagggcgtcagggtgggacgctgcaactgttccgtaccgaacaacagtatgaaaatgcgacccgcgatatcgccgtgctggaagatgccggcgtaccgtatcagctgctggaatccagccgcctggcggaagtggagcccgcgctggcagaagtggcgcacaaactgacgggcggcctgcagttacccaatgatgaaaccggagactgtcagctatttacccagaatctggcgcggatggcggagcaggcgggggttaaattccgctttaatacgcccgttgaccaactgctttgcgacggcgagcaaatctacggcgtgaagtgtggcgatgaagtgattaaggccgatgcgtatgtgatggcgtttggttcttacagcacggcgatgctcaaaggcattgttgatattccggtgtatccgctgaaaggctacagcctgaccattccaattgcgcaggaagatggtgcgccggtatccaccattcttgatgaaacctacaaaatcgccattacccgtttcgataaccgcattcgtgttggcggaatggcggagattgttggttttaataccgagctgttgcaaccgcgtcgtgaaacgctggagatggtggttcgcgatctctatccacgcggcggtcatgtcgagcaggcgactttctggactggtctgcgcccgatgacgccagacggcacgccggttgtcgggcgtacacgctttaaaaatctgtggctgaataccggtcacggcacgctcggctggacgatggcttgcggttccggtcagttgttaagcgatctgctctctggtcgcacgccagcgatcccatatgaggatctaagcgtagcgcgctacagccgtggatttacgccaagtcgtccgggccatttacatggcgcacacagctaaggaaacgagatgacccgtccgatacaggccagcctcgatctgcaggcattaaaacagaatctgtccattgtccgccaggccgcgacgcacgcgcgcgtctggagcgtggtaaaagcgaacgcttacgggcatggtattgagcgtatctggagcgcgatcggggccaccgatggctttgcattgcttaacctggaagaggcaataacgttacgtgagcgcggctggaaaggaccgatcctgatgctggaaggatttttccatgctcaggatctggagatttatgaccagcaccgcctgaccacctgcgtacacagcaactggcagctcaaagcactgcaaaatgcgcggctaaaagcaccgttggatatttatcttaaagtgaacagtgggatgaatcggttgggcttccagcccgatcgcgtgcttaccgtctggcagcagttgcgggcaatggcgaatgttggcgaaatgaccctgatgagccattttgccgaagcggaacatcctgatggaatttccggcgcgatggcgcgtattgagcaggcggcggaggggctggagtgtcggcgtagcttgtccaatagcgcggcgactctgtggcacccggaagcgcattttgactgggttcggcctggcattattttgtatggcgctagcccgtccggtcagtggcgtgatatcgccaataccggattacgtccggtgatgacgctaagcagtgagattattggtgtccagacgctaaaagcgggcgagcgtgtgggctacggcggtcgctatactgcgcgcgatgaacagcgaatcggcattgtcgccgcagggtacgccgacggttatccgcgccacgcgcctaccggtacccctgttttagtggacggcgtgcgcaccatgacggtggggaccgtcagcatggatatgctagcggtcgatttaacgccttgcccgcaggcgggtattggtacgccggttgagctgtggggcaaggagatcaaaattgatgatgtcgccgccgctgccggaacggtgggctatgagttgatgtgcgcgctggcgctacgcgtcccggttgtgacggtgtaacttgttgtaagccggatcggaggcaacgtcttctgggtgcaaaaaaatcatccatccggctggtcagcaactgtagttgttaatgtgacagagccattgcccatgatagtgtccattaaaaggatggacactatttccccggaacctgaactcaccgcacaggcgttctacataaaacgcttacgcttcattgttgactcgaactcgacttcagataaatcacgctttacccttgatggagcctgtacatagatttgtgtaattgcctgattttgatatgttcaattcaacatcaaatgaaggttaaattatggacgacaaacaattgcaggctcaggctgcgttcagcaaagcatcgcaaccggcgatagatgcttcattaaatttaagattcagcttcctcttcagccacccgtacgccaatcttcaacacttcattatcttctttctcggccaccgtccagatcatcccggcaaactctacctggtcaccgacaaccggtgccgcgcctaacaactgctggacaatttcacccagcgtttgctgcttatcacgatattctcgcccgtcttccaggccatatatcagcgcaacatcagcatatttggcgctggcttcgagaatgaagtcaccaaagaagcgttgatccagcgcgaccggcgggctctggctgaacagtttaccgagcgccggaagatcgcgttcccgaccaattacacacaacacatcgccttcgcgcagtcgggtgctgccggtaggatgaagcaactggttatcacgaaacagtgccgcaatacgcgtctcttttggcatatgcaaatcgcgcagtgccgcgcccacgcaccatttatcggcactcaattgataaacaaactgctcccacggattttccggatgaatatccaggccaacgcgactcaccggacgtcccactggcggaaccaccactttggcttttttagccgcccagctgagacttgttccctgcaagagcagactaaccagaaccacaaagaaggcgacattaaagaacagacgtgcattctccagccccgccatcatcgggaacacggccaggatgattggcaccgcgccgcgtaatcctacccagctgataaacacgcgctcacgcagattgaaaccgcggaaggggagcaatccagcaaatacgctaaggggacgggcgaagaatatcatccatgcggacaaaatgagcgccggaatggcaataggcagcagatcgcttgggttaaccaacagccccagcaccaggaacatggcgatttgcgccagccaggcgaggccgtcgaaattttgcaggatgccgtagcggttgcgaatagggcgattacccagcagaaaaccgcacagatacaccgccagaataccgctaccttccagcgcagtagttaaactgaaaatcagaataccgccacttaatgccagcaatggatataatccggcgggcagggcgatgcggttgatcatttgcagtagtaaataaccgccgccaagacctattacaatgcccagaccaaattgttgcagaatatcgacaatgaacatccagctaatattgctctcatgatgctggatcatcgcaattagggtaatcgtcagaaagaccgccattggatcattactgccggattcaatttccagcgtgctgccaacacgttcgttaagccccttaccacccagcagagaaaagaccgctgcagcatcggtagagccgacgatagcgccgattaataagccttcaatcaaatcaagattaaacagccacgccgccatcatgccggttaaaccagaggtgataagcacgcccagcgtcgccaggctcagtgccggtcctaacgccacacgaaaggaactggcctgagtgcgcatcccgccgtcgagcaaaataatcgccagtgccaggttacttaccatgtaggcgaaggggtaattatcaaacgggataccgccgacgccatcgactcctgccagcatgccgatcgccagaaaaataaccagaataggaatgccaagacgggaagaaaaactactaagtaatatactgctggtgacaaggatggatcctaagatgaaaaggctaattattgttgtggcatccaacggtcggttactcctgattacgctgtctcttatataaaccctaccatattagcggcagagacagcgttttacttagccctgaagcgtgatttttttacattttaagaacaggatgaccgctaatcgtcaactgagtgccttcccgggtgttattcagaatggcatgtgcgcccaacggcagcgtaaccgtgcgttgttcatgaccaaaatcgaggccggtaatgagtggaatgctcaggcgggaacgcaaaaacgcgtacacactctccaggttgtaacctgcgtcataatcattgggcgtgctgccgctaaagctaccgagaataatcgccttctgacgtggcaaaattcccgcatgatagagctgcaacagcatacgttcgacccggaaagggtgctcgttaatatcttccagcaccagaataccgttctcaatttttggcatccacggtgtaccgatcagactaatcagcatcgcaagattgcctccccacaacgtgccttcggcccgacatgtcgggccttccccttgccattcaatggtgaaggtttcattgcgtaacgccagccagaaatggtgctcggtaaaggcgttcagttcatccgcgccaaagtttgctaccagcatggggccgctaaaggtgatgacattgccatgcgccagaagaccgcactgaatggcggtaaaatcgctatgtccgcaaatgagcaacgggtcatgttgttggcgagccaccagtgcctgccagtcaatatctgccagtaaacgactggcaccgtaaccgccgcgtacagccagcacgatggtgttgggggtagtcagtctggcaagggaattgagatcttccagacgctctgtttccgtacccgcaaaacgctcacaacgacgggcaataacctcgacgttattgacttgatgccccgcgtcggtaaggcgctggataccacgcagcgcggcgtgctgtttaatgcagtaaccgcttggggcaattaagtgaaacagagacatggcaattccttgctgacaacagaaacgaaatgtatatcatgccgcttaggtgtgccgttgtcacctcaacggcgattccaggctataaggatagaagaagtgaaattgagatggtttgcctttttgattgtgttattagcgggttgtagtagtaagcatgactatacgaacccgccgtggaacgcgaaagttccggtgcaacgtgcgatgcagtggatgccaataagccagaaagccggtgcagcctggggcgtcgatccacaattgatcacggcgattatcgctatcgaaagcggtggtaatccgaacgcggtgagtaaaagcaatgccattggtttgatgcagttaaaagctagtacctccggacgtgatgtttatcgccgtatgggctggagtggtgagccgacgaccagcgagctgaaaaatccagagcgtaatattagtatgggggcggcttacctgaatattctggaaaccggcccgctggcaggcattgaagatccgaaggtactgcaatatgcgctggtggtgagttacgctaacggggcaggtgcgctgctacggactttcagcagtgatcggaaaaaggcgatcagcaaaatcaacgatttggatgctgacgagttcctcgaacacgtagcgcgaaatcaccctgcgccgcaggctccgcgctatatctacaaacttgagcaggcactggacgcgatgtaaatcagtcgcgcactttgtccgctttttcccgggcttctcgctcgagagagaaaataatccgctgtaattgccgctccaccgtcgggctgacgttaagaaaacggaagctcagacggggagtggtgatggtttcattcttgccatcaatcactttgcgctcgctgatggagattaactgggcgtcaaagtgaaaaacaccccattgccccatgttgacttcaatctgagcgaagcgcatgccttcttgtaattcggcaggctttgctgtttccagtaatgcgcccatgccgcctaagctcaaatcatacaggcggaaacgtaacgtactgttatccgccagtttggtctggcaaaaataaggcggatggagtggggcggagatgcggaaatatcggcgtcgttgtacaaaccataaggtgggaggcggtacggtaataaatgccggaagctgcaagtattcactctgctgtagttgttcaacagtaaactcgactttcgcaccctgagtttcggcggtaatggtaatgtgctgtgcctttagcacggcgatgttgtcttcggcttgactgccgaaatccagcaccagtttatccggggttattgccagtaatttgctgatcagctgcccgccattccaactgagacgcaaaggaattgcggctttgtgcaaatcgcgtaacacgcccaggacggctaacggattttgtttcaggaactgctcatggtaatgactcacgcggaaaaactcctgactgacaaactgtctttggtttatcggtcacagttaacaaaacttaatacaaatgcgtgaatattttttacatgttgttcttaaatcagccgacatacgcccagcatcgatcccgcccttgcctatacttagagcgttgatgtaagcatttcttgcgtccgattcatcgaaacgagggcctgaacatgggaattattgcctggattatttttgacctgatagccggcattatcgccaagctaatcatgccggggcgtgatggtggtggatttttcctgacctgtattctcgggatagtcggtgcggtggtcggcggctggctggcgaccatgtttggcattggcggctccatcagtggttttaatctgcacagcttcctggtggcggtggtgggagctattctcgttctgggcatattccgcctcctgcgaagagaataagattttcataaggcggatagcgatacagatgccgctatccgctttcacatcagaacgtatactcgacacctgctttacgggtgaaaaaaatcaatatagcacttcgatatccgataaagtcggttcccggtaacaacaacagaatccttttttaattattgtttcgttgtttttggtgtgattcagaaaataaatattttagacagtagccagagtggcgttaaaaatggggcggatagtgaggcggttttggctgcgcttattgaacatttagaattgatcaatccttctggcagattaagccaaaatacccgtagcgcaatgcttcagttacgcgaagaggaatggtctgaattctttttttggttgctaaattctctggagtgtctggattatgtgattattaatttaactccagaaagcaaaaaaacgttgatgagtgaacaccgtaacaatattcaggtagcaattgatgctttatatagccaacgtcggcgtaaaagcccgggtgatgaaagtgaaacacttacccgtagaaatgacgctatcttcggcaaccacgtatggcaaacatttgcgcaatacttcccgccaggacttgaaaaaccgtctgtgtaaaaaaaaccatagctatggtgttatctgccgacaacgccatccggagaagccgaatgacgttgtcggagtaagcgctggttaaggtgtgggttgtgcctctttggtactgggttgcgtcgttgcactcttaacggtcggacgcgtcgccggaacattgtcacacggttgctctttcgggcagatcaaatccagcattttcagcgtcacgccattggtccagccaaagccatcctgtaatggatattcgccaccgccgccccccgttccggtggtgctgacatcatatttttccaccagctttttctcccggtcataggtgtgctgaacattggtcaggaagtgccagctaatgtccatcgccacctctttttgcccgtagttttgtaatccttctgtcgcgacccactgtaacggtgcccagccatttggcgcatcccattgttgcccacttttcacgctcgtggtgttcaggccgccgggttgcagcagatgtgttttcgtcgccgtcgccattttgttggcgcgatctttcgctgccgcattgacgtacagcgggaacagggcggccgcggttaactgattgcgcactttatgacttttcaggtcgtaatcggcataccagccttgttgatcgttccacaggtatttttcgatccctttttgacgggcatttgccagcgtttcgtactggtttgccatcgcgttatctccggcagctttgctggcgcgggcgaggattttttccattttaaacatcaggctgttcagatcgaccggtacgatgctggtggtgcgtaaggtatttaactgctgcgggttgtccatccagcggctgctgaaatcccagccagacgcagcggcagagcgcaggtcgcggtaaatttcagtggcaggtcgattcggattgcttttggcggtggcaatatcttccacccaactctctggtcgtggcgtatcgcgatcgtcccagtagcggttgagaagggtaccatcctgaagtttgacaacgcgtttttcctgttgtccggcttgcaggttttcaacaccgtccatccagtaagcatattctttttgcatttgcggcaggtattgcttcaacgcggcatcgccttcatgctgcgccagtaactctaccatcagggcaaagaagggcggttggctgcggcttaaatagtaactgcggttgccgttgggaatatgaccgtaagtgtctatttcatgagcaaaattggccaccatatccgcgactttatcccagtgaccgctttcggcaagtcctaacatggtgaagtaactgtcccagtaatatacctcgcgaaagcgtccgcccggcacgacataaggttccggcagcggtaacagagaatcccatttttcggtgttttcggtagaacgcgttaataccggccaaagtccgtcaatatgttcgcgcagactctgcccctctggcggaacatatttctcgccttctttcggcagggtgaaattgacgttaacgaaatggcgcagatcaaatccgctctggttttgctgcatccgataatcagcaaggatcatcagcggatcgctgttcggcacggcatcggcaaaggttttttggtccggaaaaagtttggcgttttgcacatcattaaacagcggccctaataaaatatcaggcggctgtggtgttaccggtgtttcttctgcctgcacgcttagcgcagcgaaacacaaaaagatacaggctggaattaacgccattttttgcgggcgagaaggtgcgggggatttcatcaatcattctcctttggcgaaaccgaataaaacggtattcaagtatcagaaaaccttagttcaggatcgcactagctgcatgatcgaaatctcattctgcgaactgtcaggcattttagaaaagggaattaaagggataaataacggcgaaatagagtgatcaaataacgtctgtttattagccagccagcggcgttgggttcgtgattagcgaagaaaaatcatcataaattggtgaaaaatataacaggtagttaaaaaccattagtgctgagtaaattgccggatgacatcagaacgatgccatccgaacagtggcttaaccctgacggttgaaacgttgcgttttaacgtccagcgttagcgtttcttctggttgtatcgcatacagtttctcaccctgctggcaaatccagccaatccccagttcacgggcgattagggcgctgtgggataccggacttccggcgctaaggcagataccttttacaaccgccggatccagttgcagtactgtggaaggataaatgttctccgccagtagaatagttgggctgttaaactgcgggagttcttctttcgtttgggtcaggtggaccagggtgcgatgcagaagatcgtccacatcaatatagcgagcttgtagatattcatcatccagttgctggtattgctggctaagttctttaagaacttgctgccaggcatattctgccgtgcaatgttcatgctgaaggagttcgcttgccgccgccagcagttccggatcatctaacagtgtatggtgaccagaaaagattgcggcaatatcgtcaagcccgctggcttctgctttcgctgttaacgtcatcagatctaataacgtgaagtcaatagcctggcgtaatcgatcttgttcttcttccacggtcagggtactttttgcctgtaccgtacataaaactggttgataataaaaggctttaccgctaacaggcggaacgggacgcagagtaggtggagcgacttcctccgtttcaccaaagttatcttcagccagctgacggaaagcgatcagtgcctcttcagcttctggccctttcgcaatcaggcgcagcgtatcgttatagcgaacttgtagtaacgcaatctggttaatactctctggtgtgacgcatttgccgtttttttccagcaacatatcggcattaaatgtgcttaaggtataaaccagccgggaggccggacgtacatgcaggccgttacggttttttatgaccaccgccagagaacgggcttcttcatcgtacgcaggacatgtgtcagagatttcagtgtcggaggacggtaaacccagttgttcacgtttggcttccagcgcatgcatggcgtcaaagataactttgtcgatatccgccccgctggccgcgctgaccgttgctgccagtgtaccttcgaccaacggcgcagcacacaaacgtacttttgcggcgatctcgggagccagcaattccagcgcagtttcagcactcaataatgcgctacccatatccatcatgaccagcacatggtcggcatcagcaacagattcgatggcctccatcactttgacggcatcggtaccaatgggattttgtggatcgtcaattcccgcggcaatggcgattttacaactatcactcattaacatctgacgggctaattcaccgacaccttctcccagtcggctgctatgactaactatgaccaggtttaccatcaccaattccttactcttttgcggctaacgccaacatttgcatcataaacatcacgctggtcgcgccgggatcctggtgaccaatactgcgttcaccgagataactggcgcggcctttgcgggcttgcatcgtaatcgtactttgtgcagcggattcggcgatgctactggcagcttcgagcgccaccggaacagagagattttgctcgctggactgacgtaagctttccaccaccggcacccacacatcacacatggttttatcgccaggttcggctttcccgcgactgattacgccgtccgcgccatcgcggaacatctgataaagctcttccagtgtcaggctttgccgtgcctgggtcgcctgtgcggcgcggataaagaaggtaccgaacagcggaccactggcaccaccgacgctggaaagcagcgtcataccggtattcttgagaatgaaaccgatatctttatctgcgatagcagggagtttttccaccactttgctaaagcctcggttcatatttagcccgtggtcagcatcgccaatttcgcgatccagtccggtaagatactcgctctcggtgctgaaaatatcgccacaacgagtgagccagttaacaatttgagttctgctcagactcattgctttctccttatttaccccagttaagggccggggtgtggaccggggcgtcccagagtgccagcgtttcgtcatcaactttcagtaaggtgatactgaaaccggtcatatccagactggtgcagtacgcgccaattaaattacgttcgatagtcaatcccgcttgctggcaacgtgtggtcaggcggttatagacgccgtacagctcagaaagcggagttgcgccaagattgttaaccagcgcaatcacccgatcgccagactggagcggttgtttggtttgttgttcttcctgccaactgccttgttgataatcccagaaacgcaaagtgcgatggtaactgccatttaccagcagggtgtcgaacatttcatcgacggtttgatcaagggaagagaaggggcggcggtcaatacccggctcaccatgaatgccgacgccaaactccatctcattatccgccagggtaaaagaaggtttgcccgcggcaggaacggtacaggcaccgagagcgatacctatactgtggccttgattattcagcttacgccccagttccgcacaggcgtccagactgtcgccacgctccgccgctgcgcctacgagtttttcaattaatacggtgttggcaacgccgcgtcgcccggcagtataaagactgtcttttaccgcaacgtcgtcatcaatgaccacagtggtcacttttacgccgctatcgtgcagtaactcggtcgctgtttcaaagttaagaatatcgccggtgtaatttttgataatcaacagtacaccttcgccgccatcaacttgcatggcgcattcaaagattttatcgggcgtcggactggtgaaaatttcgcccggacaggccccgctaagcatcccctgaccgatataaccacagtgcatcggctcgtgtccgctgccgccaccgctcagcagggcgacttttcctgcaacaggggcatcagctcgggtgacatacaccggatcctgatgcagtgtcaggcttggatgcgctttcgccagtcctgccagttgttcgtccagtacgtcttgcacatcattgatcaattttttcattattttgctccagcaattacggtagggcatggatgatgttcaacgacacggcgaccactgactgccgatgaatccattgtgcatcaggcaagggaaaagaaaattagcccaaattatgtttcatagtgaaacatatgctttaatgaatgttccatattgaaacttttacgtgtattaatacttaaaattgcgagccggaacaccttttgtcataagggatgcgggatatgagtggcgcttttaacaacgatggtcggggcatatctcccttaattgcaacctcctgggagcgatgcaataagctgatgaaacgggagacatggaacgtaccacatcaggcccagggcgtgacatttgcttctatttatcggcgtaagaaagcgatgctgacgctcgggcaggctgcgctggaagatgcctgggaatatatggcaccgcgagagtgtgcgctgtttatcctcgatgaaaccgcctgcattctcagccgtaatggcgatccgcaaaccttgcagcagctaagtgcactgggattcaatgacggcacgtattgcgccgagggaattattggtacttgtgcgctaagcttagcggctatctctggtcaggccgtgaaaacgatggccgatcaacatttcaaacaggtactctggaactgggccttttgtgcaacgccgttgtttgacagcaagggccgattgacgggaacaatagcgctggcgtgtccggttgagcaaactaccgcagctgatttgccgttgacgttggcaatcgcccgcgaggtcggaaatttactgctgacggacagtttgctcgctgaaactaaccgtcatttaaatcaacttaatgccctgttagaaagtatggatgatggcgtgattagctgggacgagcagggtaatttgcaatttattaatgcccaggcggcgcgggtcttgcgccttgacgcgacggcaagtcagggacgggcaatcactgaactcttaacgttacccgccgtattgcaacaagcaataaaacaggcacatccgctcaaacacgtagaagcaacctttgaaagccagcaccagtttattgatgcggtgataacccttaaaccgataatagaaacgcagggaaccagctttattttgttgctccatcctgtggaacagatgcggcagttgatgaccagtcaattaggaaaagtcagccataccttcgctcatatgccacaggacgatccgcaaacccgccgcttgattcattttggtcgccaggcggcgcgcagtagctttcctgtcctgctttgtggagaagagggcgtgggcaaggcactgctaagtcaggcaattcataatgaaagcgagcgtgctgcaggtccttatatcgccgtcaattgtgagttatatggtgatgctgcgctggcggaagaatttattggtggcgatcgcacggacaatgaaaatggccgtctgagtcggctggaactggcacacggcggcacgctgtttcttgaaaagattgaatatctggcggtggagttacagtctgctttgcttcaggttatcaagcagggggttatcacgcgactggatgcgcggcgtttaataccaattgatgtcaaagtgattgcaacaacgaccgcggacctcgcaatgctggtggaacaaaatcgttttagtcgccagctgtattacgcgctgcatgcatttgaaattaccatcccgcctctgcgtatgcggcgtggcagcattccggcgctggtgaataacaaattacgcagtcttgaaaaacgcttctctacgcggctgaaaattgatgacgatgccctcgctcgcctggtttcttgtgcatggccaggcaacgattttgaactttacagcgtcatcgagaatcttgctctgagtagtgataacgggcgcattcgcgtcagtgatttgccggaacatctgtttaccgagcaggcgacagatgatgtcagcgccacccgcctttccaccagtctgagttttgcggaagttgaaaaagaggcaattattaacgcagcccaggtcacaggcggtcgcattcaggaaatgagcgctttacttgggatcggccgcactacgctgtggcggaaaatgaagcaacatggcattgatgcagggcagtttaagcgccgggtatgaaagacagaaacgatttctgatacatcagagtgatctgtatttcattccggcgcacgctaacaattttcagcatcgtttaagggcttgtctatcccgcacttaaaagctgaagcgatatcctccgttgacttgcttctgatcaaagaggttaccctgcgtgtaatccgcttcgagatagaatgtgtgctgtttgttatactgtgcactgactcccacgccgttattccagccattacctttgaaactgtacttctcccgggagttgttcaacagatattcggtatccccactaaactcgcggatagcgccagtcttcacatagacattcagctggctgttgcctgcggtgatgtcataccccagtatcatgctggcacgccccagcaggctttcgtagtgattcagatgtatattgaggccattactcgccttcatagtcatctcattctggtggctgtatgtaagctgggtttgcggctctatatagaacccataaccagtaggggacaggttgaacctctgcccggcttccagggagatgctcattccattcgcagtgccgttggcgttaacgccgttgttctgactgtccagtacgtggaaactatttttctggcggcttgcttttataacgagatcgctgtaaaaaccgttttgtgccatgtaactggcgtacattcccatgtagtcactacgtgcggtaccgtcgcctccgctatagtccgggcttgcatgtgtactgccaatatacagaccgacatacaacggcattacatcagagagacgtttatccccaccaaactggataccgctgtaacccatgtcaaagccgctcagtttgccactggcaaaggagtccaggcttcccccataactgcgcaaccagatattaccgtctttactctgatttcgcaggtcacccatccgttgcatcagcgtacggttttcaacatagttcaataagtaaccgacattgagataattgccgccagcatctgcggtcgtggtgggtttaggcgtgggagcgggttcaggcgtaggatcggggttgactatgggaggctgagcgggagctggtgtgggttcaggattaggagtcggttccggaactgtcccggaagcgtaaagctcccagttagtgccatttttacgcacatcgtacagatatccccccaactcaacctgagaagacgcgctgaagctggccgcgccgtcagtggtttttaccactgtcagaacttcatttcccgttgtggcctcgctgccctggttgcggatagccaatacgtgattaccagcactactcccgctgatattcaataaatcccctttattattaacgccattaccctcgccaacaacatcagcacgcataataaaggtactgttaccgctcaggttctctacgtttaatgtggcaaatgtgccggcagtactcccgtggctggcaaaatcgacagtactatggctcagcgccagcgtgtcgagattagaattacttgttacgttccagacgctgttattcattgcaacgtccagttttccgccattgacattatcgctgagggaggaacctgtccaaacgttcccagggtgcatatccagattgattagcccacctttggaaagaacgctaccgttgataagcatacgaccgctggcgttgatgcggctggcggcataaccatcgtcatgttgcgttgcgatggccatctggtcgggtgtactcatatcaatgaccagatcgctcgtgaggtcgatctggctgttggtcatggcataaattcccctggctcctgccgcgccggtgatagccaaactgtctccggttattctaccgccgctgagagcccacaaacccagcgccagactgccattacgatcaactgtaatatcggtattttgcatgttgacaacagccgttgccgtctgggcgctggcaccataagaaccgccggaaaagatgctgtttcgttgcgctgccgtgccagtaaaattgattatcgcgtcactaccactggtgacgaggccaccgccctgcgcggaagaaatatggctatctgcaccgatagtggttgtaccaccacgaacttcgacgccattggccgcggctccagttacatcaacagtgagtgcattcgcgctaacctggccaaagctccagaggccgtgagcattatcgccattggttttaatggtactgtttgttccgagatcgacaacagagtttttctgtacgtttatccccatggcgctgtagccctgaacatcgattgtcaggtctgtagccgtaaaacgcgcagcaccattggcgttattgccgttgagaccaccgatataaacacctgtacttccatcggtcgtgattttacttccgcttccaagatcgacactggtgccatagtcattgatggttaggcctataccgttgctgttttcaatggtgaattgagtggctgttagtgtactgctatgcccaataatgatgccgtcatcgttactcttaatggtgctgcctgtgcctaagtcagcatgggtatagtcaccaattaagttaatgccgatggcagaggtttgaccaacaacatctactgtgagtcggttagctgtcagggagctgtttttgccctgaataatgattccttttgcatatccagaggcgtcgttgacattgacggtgacatcattacccaggttgatattgccaggcgtgtttcctgctggggtcattacaccatagaggtttccacttggatcggcggtatctcctgtaattctgtcaccatcattaatagtaatattggtgccatattgacttcctgtatcagcagctatcagcaggggggaaaagataattgcattcaaaccaatagcgccaaattttatcagttgaatactggggctacggatttttaattcagcgagacgatctgctttggtattcccattgtgttgtttgatgcccataccactcctatatagtacccagactatgggtctatggattttgtcattttgtttaaatcaatgaataatatcctcttatcatcatgatatttgtatggtgcaatcatgatgagcttctcagagaataattctctattaccgggcaaaatcaggaacacaggaattaatatatatttaacatcccccttacaaaggtgagtttatatcgagttattccctaagttgtcgttacttattccaattcgttactataaatatggcaaaaatattacaacaaacagcggttaaaaaatttggtgaagattttttgtaataatcctaattagttatgggaatttcgcttgatgtatctgcataacaaaaacaatatgcgccatttttgcattactaataagaaaaagcaaaaaacatcgatattcatttttggtcaatgggttttctggcctatcgttgttattgtgctactggttatcattttcatcttgccagcatattggagcgtgatcaattttgatcagctgtgaagggggctgatgtgtagtgatacaaaaacttacgttatatcactgctaatgagatatccggcatctgaacacttatgtctttaattattctcgtggttcactataggcaataagcacaaaagtgtaggatgttacaagaatgattaggactcggtgaaatgaaaaatccacgcaattgcgtggattttatatacttttgcgctcttcatgagatttagcgaaacctcatgagacaataaattaattagacgttgaaaaggaagttcatcacatcgccatctttcacgatgtaatctttaccttctgcacgcattttgcctgcttctttcgcgccttgttcacctttgtaagtgatgaaatcttcaaagctgatggtttgtgcacggataaagcctttttcaaaatcagtatggattttgcccgctgcctgcggcgcggttgctccaaccggaatggtccatgcacgcacttctttcaccccagcggtgaagtaagtttgcaggttcagcagtttataaccggcacggatcacacggttcaggcccggctcttccagcccaagctcctgcataaactcgtcacgttcttcgtcgtccagttcggcaatgtctgcttcaacagcagcacaaaccggaaccacaacagaaccttctttcgccgcgatttcacgcacctggtcaagatatgggttgttttcaaaaccgtcttcgttgacgttggcgatgtacattgttggtttcagcgtcaggaagctcaggtaacgaatagccgctttctcttcagcgcttaaatccagcgcgcgcagcatacctgcattttccaactggggcaggcatttttccaggaccgccagctcagctttcgcgtctttatcgccacctttggctttcttctgtacgcgatgaatcgcacgttcgcaggtgtcgaggtctgccagcgccagttcggtgttgataacttcaatatcgtcagccgggttaactttgccggaaacgtgaatgatgttgtcattttcaaagcagcgaacaacgtgaccgatcgcttcggtttcacggatgttggtcaggaactggttacccagaccttcgcctttgcttgcgccttttaccagaccggcgatatcgacaaattccatggtcgtgggaagcgtacgctgcggttttacgatttcagccagttgatccaggcgaggatcaggcattggtacgacgcctgtgttcggctcaatggtgcagaatggaaagttggccgcttcaataccggctttggtcagcgcgttgaacagggtagatttcccgacgttgggcaaaccgacgataccgcatttgaatcccatgatttaaatcaccttaatatcttaataatcaacctgttattgctaacagattgcagaaatggaaataactttgcctattatacacggcactcggcaaaaatgccgcagacaacgacttattgcgctttaaaggcgtgcaatcggttcgttgctttggtcaagccatctgtaaaccacatttcagtacaacgcgccgcttcgtcaatggcttcatcaattaacttctgttcactaacaggcggtttgcctaacacaaaaccgacaactttatttttatcgcccggatgaccgattccgatgcgtaaacggtgaaagttagggttattacccaatttactgatgatgtctttcagtccattgtgaccaccatggccaccgcccaatttaaatttggcgacgccaggaggcagatccagttcgtcgtgggccaccagaatttcgtccggattaatgcggaaaaaactggccatcgccgcaacggctttgccgctgagattcataaatgtagtcgggactaacaggcggacatcttcgcctccaagagtgactcggctagtataaccaaagaatttagcctcttcgcgcagcggagcgcgcaaacgctctgccagtaagtcaacgaaccaggtaccagcattatgtcgcgttgcggcgtattcagcaccggggttcgccaggccgacaatcaatttaatcgtcacgtttttttgtcctgagtgtgtacataactggcgcgtagtttactggttgcggccccgcttgacaaaaaactgcgtatcaaatgcagataacgtaataattgcctgagtggactattagaaagtcaaggtgttcaggcgtttatttgtaaagttttgttgaaataagggttgtaattgtgatcacgcccgcacataacccactgggtgttgtctatactttacacataaggaagaggggtattccctgttacaacccagaaagttccggaggtgacatatgaaacgcaaaaacgctagcttactcggtaacgtgctcatggggttgggtctggtggtaatggtggtcggcgtggggtatagtatcctcaaccagttaccacagtttaatatgccccagtatttcgcacatggtgcagtgctaagtattttcgtcggtgccattctctggctggcgggtgcccgtgttggcgggcatgaacaggtgtgcgaccgttactggtgggttcgccactatgacaaacgttgccgccgtagcgataatcgccgtcatagctaacaaataatgcagtttgctgaccagtcagtttgcgctgactggtcaatctcgtacttataaatccgccatcgccgcgcgacgattcgggaagaacgccaggcgtcccgggatcggttgaatgccagcgcgagccatagtgcgcagtggctggaattccacgttgcacacgcgcagttcacatccctcgggcagacgcttcacaaaacgctggaacgcatcaagaccaccagcatcaagtaccggaacggcatcccacttcagaatcacaatccgtttgccttcaagacgactctccaggtccgtgaataagccttcagcagcagcaaaaaacagcgggccaataacgcgcagaaccaggacatcgtctggaacatctacgactaccggtgccaggcgagtcatacgtgcgatacgacgcataaacagcaggcttgccagcacgatccccacgctgatggcaataaccatatcaaacaacacggtcaggctcatgcacagcagcatgacgatgatgtcatctttcggcgcatgacgcagcaagtcgaccactttgtgcgcttcactcatgttccacgccaccatcaacagcagggctgccatggcggaaagcggcagccaggagagcagcggtgccagtaccagcagggcaagaataaccagaatagagtggatcaccgcgctgataggggacgttgccccggcacggacgttagcggcagaacgcgcgatggcagctgtagcggtaataccaccaaagaacggagcgataatattccccagtccctgtccaaccagttcgctgttcgccttgtgtttcgtcccggtcataccatccagcaccacggcgcagagcagagattcgattgcgccgagcattgccatactgaatgccgcaggcagcagtgtgcgaatagaatcccaggttagcgtgaattcactattaggcagatcccacggcagcaccagttgcggcagcagttgcggaataccgttaccctgagaaccatcggccaggacgtagtggaattggctaccgatggtagcaacatgtccgccgagcaggttaacaatccccatcaccgcgcaaccagccagcaaggccggaaggtgaccgggtaaacgaatgcccagacgcggccaaaaaacaagaatacctagcgtcacaatgccaatggcagcatcacccacattaatggtcggcagcgccataaataatgcgccgactttttgtagataatgttccgggacatgggccatttgcagaccgagaaaatctttaatctgcatggtaccgatggtgatcccgataccgctggtgaaacctaaggtgacggaaaccggaatatactcaatcaggcgaccaaagcgtgccagacccatcagaatcaaaaagatcccgctcagcaaggtcgcaaccagcagtcctgccagtccaaactgttggctcacgggatagagaattaccacaaatgccgcagtcggaccggaaacgctaaagcgactcccacccgtcagagcaatgacaatccccgcaacagctgcggtatataaaccgtactggggtgccacaccactaccaatagccaacgccatcgccagcgggatagcaataatcccgacggttatcccggcaatcaggtcacgggtaaaccgtgcggcagtatatttttctttccagcaagcgtcgatcagagcgcggaaaggcatcacatgactggaaaatattttgttcacaataatgtttcatccgtgagcgcatcatctgtcaactaaatggcaggtgaaggaggcataggtcatacaaatggatattacagacaaaaaaacccgccgcagcgggtctttgagccgggttcgattagtgttcgaacatggcagagatgctttcttcgttgctgatacgacgaatcgcttcggccagcataccactcagggtcagagtacgcacgttcggcagacttttgatttcatcgctcagcggaatggtatcgcagacaacgacttcatcaattacagagttacgcaggttgttcgccgcgttgccagagaagatcgggtgagtcgcgtacgcaaatacacgtttagcaccacgttctttcagagcttcagcagctttacacagcgtaccgccagtgtcgatcatatcatcgaccagtacgcagtcacgacctgcaacgtcaccgatgatatgcatcacctgactaacgttcgcacgcggacgacgtttgtcgatgattgccatatcggtatcgttcagcagcttagcgatagcgcgggcacgcacaacgccgccgatgtccggagaaaccacaattgggttatccagattcagctgcagcatgtcttccagcaggatcgggctaccaaatacgttatcaaccggaacgtcgaagaaaccctgaatctgttcagcgtgcagatccactgtcagcacacggtcaacaccgacgctggagaggaagtctgcaaccactttcgcagtgattggtacacgagcggaacggacgcgacggtcctggcgcgcatagccaaagtaggggataacagcggtgatacgacctgcggaagcacgacgcagggcatcaaccataacgactaattccatcaggttgtcgttagtaggggcacaagtggactggatgatgaaaatatcaccaccgcgtacattttcattaatttgtacgctgacttcgccatcgctaaagcgacctacagcggcgtcgccgagactagtgtacaggcggttggcaatacgttgtgctagttccggggtggcgttaccagcaaaaagcttcatatcaggcacgagaagaacctcaggcatgcgtccattggtggaaagaatctgccgaaaactgtgcgggccaggcatgatcctttccaggcggtgtattaaagagcgcgatgcaacgtctggaacaaggtgacgttgtcaccgaaactcagcttgcccggcttaaagcatggctctgtgcaatggggaaagattagcgcctttcgccacaaagccattgagccattccggggcttgctctagcacctggcgggcttcagactctgtatcaaattcagcaaagacacaggcccctgtcccagtcaggcggctcggggcgtattctaacagccaggaaagcaccgcatcaacctcgcgaaaacgttttcttgcgataacctcgcaatcattgctgaattcacattttagcaacgtttctatactcctttttggcgtattgcgcgggagttcaggatctttaaaaatcaccggagtcggaatacttacaccagggtgcgccaccagataccacttctctggcggatccaccggcgttagtatttcaccaacgccttcggcaaacgcggcatgcccccgaacaaagacaggaacatctgcgcccagcgtcagccccatttccgccagctcatccatgcttagcccgcattgccagagatgatttaatgccaccaggaccgtcgcggcattggaactaccaccgccgagaccgccgcccatcggcaaacgcttgtcaatgctgatattcgcaccgcttcccgtcggaagacgcccgctgtctgccgcagttttcatcaacaatcgcgctgcgcgaacgatcaggttatcttcatgttccacgccttcaacgggcgttaacagacgaatatccccatcgtcacgaagctcaatgctgatggtgtcgccgtaatcaagaaactgaaacagcgtttgcagcgtgtggtaaccatccgcacgctgaccggtaatgtataaaaacagattaagttttgccggagagggccactgtgtccgcattatttcactatccagttatccatttttaacttgatgcgttgaccaccgtcggtgagttccatattggctggcatcgcaggttgcgttttggtgtcataaccaccataaacaaccttccagtttttgccattctggctgtaggtaatttcgctcaggcggtactggtcgtccagtttgtagtcggttgcatcacccggtaaacctaaaatccactggcgcaagctgttgagcggaattggcattccggtcaatttgccaatcatctcttcggcgtcatcggcggtataacgctgacctttattgtcgactaactgcacgttacccggttgagcattcagctccagttccgtgctgcccaatgggttagtgagcagcagacggtagcgatcctggccggtttgctgccagaaaaagcgggcgtacactttttgttggtcagaaatataagcgaacgcgccgcgagtctgatactgattaagattgcgcacgtcttgctgatgctgacgccattgtgggctatccgggcttttgccaggacctttgggcgtggtaacggaacaggcagtgagcacaagagcagccagcggtagcaggcggataagacgaaaatcgggcaggggcatagtgatgacaagtccttgagatacgttgcagttataacccttaatgctagcgttaccgtccgctatcgtctatgttcaagttgtcttaattgccagaatctaacggctttcggcaattactccaaaagggggcgctctcttttattgatcttacgcatcctgtatgatgcaagcagactaaccctatcaacgttggtattatttcccgcagacatgacccttttagcactcggtatcaaccataaaacggcacctgtaagcctgcgagaacgtgtaagctttagcccggataagctcgatcaggcgcttgacagcctgcttgcgcagccgatggtgcagggcggcgtggtgctgagcacgtgcaaccgcacggaactttatcttagcgttgaagagcaggacaacctgcaagaggcgttaatccgctggctttgcgattatcacaatcttaatgaagaagatctgcgtaaaagcctctactggcatcaggataacgacgcggttagccatttaatgcgtgttgccagcggcctggatagtctggttctgggggagccgcagatcctcggtcaggttaaaaaagcgtttgccgatagccaaaaaggtcatatgaaggccagcgaactggaacgcatgttccagaaatctttctctgtcgcgaaacgcgttcgcactgaaacagatatcggtgccagcgctgtgtctgtcgcttttgcggcttgtacgctggcgcggcagatctttgaaagcctctctacggtcacagtgttgctggtaggcgcgggcgaaactatcgagctggtggcgcgtcatctgcgcgaacacaaagtacagaagatgattatcgccaaccgcactcgcgaacgtgcccaaattctggcagatgaagtcggcgcggaagtgattgccctgagtgatatcgacgaacgtctgcgcgaagccgatatcatcatcagttccaccgccagcccgttaccgattatcgggaaaggcatggtggagcgcgcattaaaaagccgtcgcaaccaaccaatgctgttggtggatattgccgttccgcgcgatgttgagccggaagttggcaaactggcgaatgcttatctttatagcgttgatgatctgcaaagcatcattagccacaacctggcgcagcgtaaagccgcagcggttgaggcggaaactattgtcgctcaggaaaccagcgaatttatggcgtggctgcgagcacaaagcgccagcgaaaccattcgcgagtatcgcagccaggcagagcaagttcgcgatgagttaaccgccaaagcgttagcggcccttgagcagggcggcgacgcgcaagccattatgcaggatctggcatggaaactgactaaccgcttgatccatgcgccaacgaaaagtcttcaacaggccgcccgtgacggggataacgaacgcctgaatattctgcgcgacagcctcgggctggagtaacagtacatcattttctttttttacagggtggaggaggaataatggaatatcaacactggttacgtgaagcaataagccaacttcaggcgagcgaaagcccgcggcgtgatgctgaaatcctgctggagcatgttaccggcagagggcgtacttttattctcgcctttggtgaaacgcagctgactgacgaacaatgtcagcaacttgatgcgctactgacacgtcgtcgcgatggtgaacccattgctcatttaaccggggtgcgagaattctggagcttgccgttatttgttagcccagcgaccttaattccgcgcccggatacggagtgtctggtggagcaggcactggcgcggttgcctgaacaaccttgccgtattctcgatctcgggacgggtaccggggcgattgcgcttgcgctggctagcgagcgcccggactgcgaaattatcgctgtagatcgtatgcctgatgctgtctccctggcacaacgtaatgcccagcatctggcgatcaaaaatatccacattctgcaaagcgactggtttagcgcgctagccgggcagcagtttgcgatgattgtcagcaatccgccgtatattgacgagcaggaccctcatcttcaacaaggcgatgtccgctttgagccgctcactgcgctggttgcggcagacagtggaatggcagacatcgtgcatatcatcgaacagagccgtaacgcgctggtatccggcggctttctgcttctggaacatggctggcagcagggcgaagcggtgcgacaagcatttatcctcgcggggtatcatgacgtcgaaacctgccgtgactatggtgataacgagcgcgtaacgctcggccgctattatcaatgacaagtttttctacactgcttagtgctcatcttattagtatcgcgctttctgttgggctattaaccttacgtttctggctacgttatcagaagcatccacaggcatttgctcgctggacgcgcattgtgccgccggttgtcgatacgctgttactgttaagcggcattgcgttgatggctaaagcgcacatcctgccattttccgggcaggcacagtggctgactgaaaagctgtttggagttatcatttatatcgttttgggttttattgcactcgattatcgtcgtatgcacagtcagcaggcgcgcattattgccttcccgctggcgttggtggtgctgtacatcatcattaaactcgccaccacaaaagtaccgttactggggtaagtcatgagaagcttagctgatttcgaatttaataaagcgccattgtgcgaaggcatgatcctggcttgcgaagcaatccgccgcgattttcccagccaagatgtttacgacgaactggagcgtctcgttagtctggcgaaggaagaaatcagccagcttctgcctttagaagagcagttggaaaaactgatcgcgctgttttacggcgactggggatttaaagccagtcgcggtgtttatcgtctttccgatgcattatggctggaccaggtgttaaagaatcgacagggcagtgcggtaagtttaggtgcggttttattatgggtcgcgaatcgtctcgatttgccgctgctgccggtgattttccctacgcagctgatattgcgcattgaatgtccggatggcgaaatttggctgattaatccttttaacggtgaaagcttaagcgaacatatgctggacgtatggttaaagggaaatatcagcccgagcgcggaactgttttatgaagaccttgatgaagctgataacattgaggtaatccgcaaattgctggatacactcaaagccagcttgatggaagaaaatcagatggagctggcgttacgcaccagcgaagctttattacaattcaaccctgaagatccctatgaaattcgcgatcgcgggttgatttatgcgcaactggattgcgaacacgttgcgttgaacgatttaagttatttcgttgaacagtgtccggaagacccgatcagcgaaatgatccgtgcgcaaataaataacatcgcgcataaacatattgtgctgcattaattaatcgacattttactcaagattaaggcgatcctatgaaacaaaaagtggttagcattggcgacatcaacgtagcaaatgacctgccgttcgtactgtttggcggtatgaacgtgttggaatctcgcgatctggcgatgcgcatttgcgagcactacgtaactgtgacccagaaactgggtatcccttacgtgttcaaagcctcttttgacaaagccaaccgctcctccatccactcttatcgtggaccgggcctggaagaagggatgaaaatcttccaggagttgaagcagacttttggcgtgaaaattatcaccgacgttcacgaaccaagtcaggcacagcccgttgctgatgtcgtggatgtgattcagttgccggcgtttcttgctcgccagactgacctggttgaagccatggcgaaaaccggtgcggtaattaacgtcaagaaaccacagtttgtcagcccgggacagatgggtaatatcgttgataaattcaaagaaggcggcaacgaaaaagtgattctttgcgatcgcggtgctaacttcggctatgacaacctggttgtcgatatgctgggcttcagcattatgaagaaagtgtctggtaacagcccggtgattttcgacgtgacccacgcactgcaatgccgcgatccgtttggcgcagcttccggtggtcgtcgtgctcaggtggctgagctggcacgagccggtatggcggtaggtctggcggggctgtttattgaagcgcatccggatccggaacatgcgaaatgtgatggtccatccgcgctgccgctggctaaactggaaccgttcctcaagcagatgaaagcgattgatgatctggtgaaaggtttcgaagaactggataccagcaagtaatcttttttgcttgaaaaataaagtattagcgttctgcgttaagacttttttcatgggtgccggatacaaaaaaggccgcaggctgttacccctgcggccggtttcgggcgcatattgccatcacggcagcctgacgcccgttttcaccttacttccggttacgccaccagctgacaatcgctgcggtaataattcccgccaggatcggtgctgccaggtcgtgccagaaaatcatggcaaactgcgcgagcgtcatatagccgccttgttgtaatgacaacattttgcggctattcttgaattgttctggttcaagattagcccccgttctgttgtcaggttgtacctctcaacgtgcgggggttttctctttccagcaaccaatgccaccagggataaagcccccgcaacattgcgcctcaccggataacgccggcttggtgtggatactacgactcaattcatcttcacttcatccctgaaatgtttgcaatgaagagtgcattccggtttttcaacagctgttacagtcatttcatgagtgctctggatgaggcttccagctcgggttgccaatatttacttgtggaagtgataaagacaaaaatggccgcaggctgttacccctgcggccggtttcgggcgcatattgccatcacggcagcctgacgcccgttttcaccttacttccggttacgccaccagccgacaatcgctgcggtaataattcccgccaggatcggtgccgccaggtcgtgccagaaagtcatggcaaactgcgcgagcgtcatatagccgccttgttgtaatgacaacattttgcggctattcttgaagtgtctggtttcaagattagcccccgttctgttgtcaggttttacctctcaacgtgcgggggttttctctttccagcaaccaatgccaccagggataaagcccccgcaacattgcgcctcaccggataattccggcttggtgtggatactacgtctcaattcatcttcacttcatccctgaaatgtttgcaataaagagtacattccggcttttcaacagctgttgcagtcgtttcatgagtgctctggatgatgcttccagctcgggttgccaatatttacttgtggaagagataaagacaaaaatggccgcaggctgttacccctgcggccggtttcgggcgcatattgccatcacggcagcctgacgcccgttttcaccttacttccggttacgccaccagctgacaatcgctgcggtaataattcccgccaggatcggtgctgccaggtcgtgccagaaaatcatggcaaactgcgcgagcgtcatatagccgccttgttgtaatgacaacattttgcggctattcttgaagtgtctggtttcaagattagcccccgttttgttgtcaggttttacctctcaacgtgcgggggttttctctttccagcaaccaatgccaccagggataaagccccgcaacattgcgcctcaccggataacgccggcttggtgtggatactacgtcgcaattcatcttcacttcatccctgaaatgtttgcaatgaagagtacattccggcttttcaacagctgttgcagtggtttcgtgcagggtgtggtacaggctcgcaattctgattaacgacctgtccaggtagtatgaagaaatacaataagcaggaatttatattatctcccccgattaccgtcatcggaggagatataactgtcaggcaaatatcgtcatcaaataggcggcaaacagtgccagatgcgctgcgccattgagcatgttagtacgtccggtggagaaggagatatggcacagcactaaagaggccaccatcaccaccatttctggcgcaccaagtgcaaactgcaattcgttacccgtcataaaggcaattagcgtgacgacaggtacggtaaggctaatggttgctaacacactaccaaagaacagattcatcgcgcgctgaacctggttgttcaacactgcttttaatgcacctaaaccttccgggctcagaatcaacagtgccaccaggaagccagtaaaggcgacaggggcattcatgctgtcgagcaatgtctccaggctgctggcgttcattttggtcaccgcaataacggcaatcagatggataatcaaccagatagcatgccacaggctgctatgggcagacggtttaccgtgatgcgggtcgtcatcatcactgtcatcttcgtgctcgtagacaaacaaactttgatgcgttttggtctggatcagcaaaaatacgccatacattgccgcagaaattaatgctaccagtaacgcctgaccggtactaaaattcgccgcaggcagagccattggaaataccagtacgattatcgccagggggaacagcgcaattaaatactgcttgataccaaacagattcatatattgggtggcaaacttacgaccgcccaacaataaactaaagccaaccagcccaccggtaacaatcataatgatactatagagcgtatcacgcattagcgttggcgcggcgtcgccggttgccattaaagcactaatcaaactgacttcaagaataaccacactaaggctaagaataaggctaccgtaaggttctcccaggcgatgggctaatacgtccgcatgacggacaacactaaaggcgctacttaaaataccaataagcgcaagaagattgatggcaatgaccactggtagtgtctggctgcttccccacaggaacagcactaccagcgccagaaccgggaaaataaggctagtctccttgtggcgggtttttaccgcctcttgagcattactcattatggttatccctttgcagatgaatttatcgaaaatgtaaaaaataggtaggaaaaataacagaaagtgtctggatatcggtaacattttacgaatttttaccccgctgtcgattttttactcattggggcataaaaataagtattacgtttagacaatgtttgttttagcgtctcttaagaagagtctgacctgaaaattcttatgttttggcaagagtagatattgttgaccacacttaatgttcaactttgtaaaaggagtcaacgatgccgtataaaacgaaaagcgatctgccggaaagcgtaaagcacgttctaccgtctcatgcccaggatatctataaagaagcgttcaacagcgcatgggatcaatataaagataaagaagatcggcgtgatgacgccagtcgcgaagaaaccgcgcataaagtggcctgggctgctgtgaagcatgaatatgccaaaggggatgatgataaatggcataaaaaaagctaaaaccggtcgcttagttaaagctattcgtgcggtgttgccttgcaagtggtccgtggattgcatattgtcccgttagtggtttcaaaatgagcagtaaaaatgtccggaagacaccaaaaagttgtcgcagggaagtatgcagtggcggaagtgtaaggtgataacgcgtgatttcttgatgaatgccgattgtaaaacggcatttggtgccattgaagaaagtctcttatggagtgcagaacaacgggcggctagcctggcggcgacgctggcttgtcgacctgatgagggaccggtgtggatcttcggctatggaagcttgatgtggaatccggcactggagtttaccgaaagctgcaccggtacactggttggatggcatcgcgcattttgcctgcgcctgaccgccgggcgcgggactgcgcaccagccgggacggatgcttgcactgaaagagggcggacgcaccacaggcgtcgcctatcgactgccagaagagacgctggagcaggaactaaccctgttgtggaagcgagagatgattaccggctgttatctgccaacctggtgtcagcttgatcttgatgatggacgcacagtaaacgccattgtgtttattatggacccgcgacatccagaatatgaatctgatactcgcgctcaggtcatcgcgccgttgattgcggcggcgagcggtccgctgggaaccaacgcacaatacctgtttagtctggaacaggagcttatcaaactgggaatgcaggacgatgggctgaatgatttgctggtaagcgtaaaaaaactgctggcggagaattttccggatggtgtgttacgtccgggattcgcctgagtaaacttcccgcatagtggggcgtcagacgccccctcaaacattaaaatgtgagcactttatcggcactcagcgtccattgcgccagttccacaagagtaccgatttccaccccatcaatcagaggaagtgtactaatcccgcgcccgtcggtacaggttttgcacaatttcaccggtacattctgagcggtaaggatctccagcatttgctgaatgttgtagccttcccctggtttttgcccgcgcaacccggctgtgaccgcatcagacatgaggaacagacgcagatccagattgctctcctgctctcgtaacgcaatggccagccgcaagctgttaaacaaggattcgctcccgtaaggtgcgccattggcaacgatcacgattttttgcattatttactcctgtattcagggaattagacactcatcttctatcttactgcttctgcagcgtctgaccaatcggtcacatttttaaggattttcctgaaagcgcgagaaaatacgacaaaagttgccagtaatcgttattctttaaggctatggtttttcattattaccggaagttaccgacgttttgagccgtttcgttcctcgcattatcccgttttatttactcttgcttgtagcaggcggtacagctaacgcacaatctaccttcgagcaaaaagcggcaaatccctttgataataacaatgatggtctgccggatttaggcatggctcccgaaaatcatgatggggaaaaacactttgctgaaattgtgaaagatttcggcgaaaccagtatgaatgataacgggctggatactggcgagcaggcaaaagctttcgcattgggaaaagtccgcgacgcgcttagtcaacaggttaatcagcacgtagagtcctggctaagtccgtggggaaatgccagtgttgacgtcaaagtggataacgaaggacatttcaccggcagtcgtggaagctggtttgtgccgttacaagataatgatcgttatctcacctggagccagcttggtcttactcagcaggataatgggttggtgagcaatgtgggcgttgggcaacgctgggcgcgcggcaactggctggtgggttataacactttttatgacaacttgctggacgaaaatcttcagcgagcgggctttggtgccgaagcgtggggcgaatatttgcgattaagcacaaacttttatcagccgtttgctgcatggcatgaacagacagccacgcaggaacaacggatggcgcgcgggtacgacctgacagctcggatgcgcatgccgttctatcaacacctcaataccagtgtcagcctagaacagtattttggtgatcgtgttgatttgtttaactctggtacgggttatcacaatcccgtcgcgttgagtctgggattaaattacacccctgtgccattagtcactgtgacggcccagcataaacagggtgaaagtggcgaaaatcaaaataacctcgggctgaatcttaattaccgctttggtgtaccgctcaaaaaacaactttctgcgggcgaggttgccgaaagtcagagcttacgtggtagtcgctatgacaatccgcagcgaaataatctaccgactcttgagtaccgacagcgaaaaacgttaacggtgtttctggcgacaccgccgtgggatctaaaacctggcgaaacagtgccgctgaaattacaaatccgcagtcgttacggtattcggcaactgatttggcagggcgatacgcagatattaagtttgacgccgggcgcacaagccaacagcgcggagggctggacgctgatcatgcctgactggcagaacggggaaggggcaagcaatcactggcgattgtctgtggtggtggaagataaccaggggcagcgtgtctcctccaatgagatcacgctaacgcttgtcgaaccgttcgatgcattgagtaacgacgaactgcgctgggaaccgtaatcagaaaatgcgctcctgatgcacccataccgctgcttccacgcgagacttgagcttcattttcttcagcatgtgcttgacgtgcacttttactgtgctttcggtgatatccaggcggcgggcaatcatcttgttcggcaaaccctgggcaatcagcttgagaatatcgcgctcgcgtggggttaactggttaacatcgcgctcagtagtggcacggttagcgcgcaagctggcggccagaacaggcgttaatgcttcgcttaataccatttcgccagcagctgcctgatgcaatgctttcagcagatcttccggttccatatcttttaacagatagccatccgcgccgcgtttcagtgcggtgaccacatcttcttcatggttagagacgctgaataccacaatgcgcccactgagggacttttcgcgcagtttatccagcgtttccagaccgttcatgccgggcatattgagatctaacaggatcagatcgggatcaagagactccgccagttcaataccctgttcgccattactcgcttcgccaaccacggtgatatctggtgccatactgataagctgttttacgccagttcgcagcatcgggtgatcgtcaatcagcaggatagtagccggttcctgattactcatgggtatctccttggacgtctgtgaaagttttttcgggaataaaggtgaccaccacttcggtgccaccactttcacgacggcggacgcggcaatcgcctcgtaaactttgcgcacgatcgcgcattattatcatgccgtagtgattgctgcggatggcattttcaggcacgccgcagccgttatcctggacggtcagtttgacctgattatcgttttgcgccaccgtcaccacgacttcactcgcttggctatgtttgagggcgttacttaatgcctcacgggcaatttgcaacaagtggattgcctgatggctaggcaccaggcgaggcggcaattgataatccagcttcaccgggaagccaaatttggcgctgtactcttcgcaactcgcctccagcgccggacgtaatccaggctcggtgagctgcaagcggaatgtggtgagcaattcacgcaactgcgcccaggatgcattcagttcgttacggatctgacttaacagttcgcggctgctttctggcagcgcatcgccctgcatctgtaaacaactcacctgcatcttcatgcaagagagagattgggcaatagaatcatgcagttcgcgcgcaatggtggcacgctcttccatcacgatcaactgttgctgacgttcctgatggcgatccagcgccagcgtggcggtgagttgttcaaccagggtatccaccagttgttgttgatcatggctaagatgacgcccctgcggcagggtcgccagcaaaataccgtactgcgtatgagagtcagccagccgccacttcagggtcgtgccgcgatcaccaacgggtaatacgccgcgcgggcagagctggcagcctttatcatcacaagtcatatctggctggcaggtaaactcctgatgattctcttcatcatcagtgtcatacacccgcaattcgatatcacgtagcagggttaaattctgtaagccgttgagtacaggactcaggcgttcacacagcggggcgcgggaatgcaaacggcggttagcctgccataaaaaagagaggatctgatttttatgctccagcccggcggttttctcctgaacccgctgctcaagtacggcataactttcggccagttctgcagacatattgttcaacgcagttccaagcatcgccatttcgttgcgcccgctgatgtttgcgcgttgggtaaaatcgcgatgactgacggcactcgccattgccagcagttgccgccacggttgtagcagtcgcgcccgcaaccagataatagtgaacaccagtaaaagtgccataaataccgccattacccgatggaccagtaccactgtctcgatgcgcatttccgtggtgcggtcaaaaccagataccagttgatcaagcccggcaacaaactggctgacatccgcactcaccgtttctcggttttgtgcacgcatcagcgcagggatcagttcattacgccagtaatcttgtaaaccctgtaattgcgccagttgtccgtctcgttctgctgctcgagtcaactcggcgctaaatgccgtttgttccatctctttaattaagggcttgtctttctcgcttaatggcactgccgccaacagacggtaactttgcatgcgcaggcttcccgctttgttgatcgcatgggcgctgccctgaacgccttgcaccagccagccagaaaccgccatccctgccagtccaatagcagtagaaagcaacacaataagcgcaacctgattaaccagggtgagcggagagagacaacgtttaagcatgtaaacctcttccttcaggctttaaatgagcaataaccttaatgaatgtgacgatacattctggaatggcagtattctcggctattggctgaagtatacccatacccggaaagagttactccttatttgccgtgtggttagtcgctttacatcggtaagggtagggattttacagcaccgtgaaaaatctcataatttttatgaagtcactgtactcactatgggtaatgataaatatcaatgatagataaagttatcttatcgtttgatttacatcaaattgcctttagctacagacactaaggtggcagacatcgaaacgagtatcagaggtgtctatgagtcacagttccgcccccgaaagggctactggagctgtcattacagattggcgaccggaagatcctgcgttctggcaacaacgcggtcaacgtattgccagccgcaacctgtggatttccgttccctgtctgctgctggcgttttgcgtatggatgttgttcagcgctgttgcggtgaacctaccgaaagtcggctttaattttacgaccgatcagctatttatgttgactgcgctgcctagcgtttctggcgcgttattacgtgttccatactcctttatggttcctatcttcggtggtcgtcgctggacggcgttcagcaccggtattctgattattccttgcgtctggctgggttttgccgtgcaggatacctccacgccttatagcgtcttcatcatcatctctctgctatgcggctttgctggcgcgaacttcgcatccagtatggcaaacatcagcttcttctttccgaaacagaagcagggtggcgcgctgggtctgaatggtggtctgggaaacatgggcgtcagcgtcatgcagttggttgctccgctggtggtaagtctgagcattttcgcagtatttggtagccagggcgtcaaacagccggatgggactgagctgtatctggcgaatgcgtcctggatatgggtgccgttccttgccatcttcaccattgcggcgtggtttggcatgaacgatcttgctaccagcaaagcctccatcaaggagcagttgccggtactcaaacggggtcatctgtggattatgagcctgctgtatctggcaaccttcggctccttcatcggcttctccgcgggctttgcaatgctgagtaaaacgcagttcccggatgttcagattctgcaatacgctttcttcgggccgtttattggtgcgctggcgcgttctgcaggtggtgcattatctgaccgtctgggcggaactcgtgtcacgctggtgaactttattctgatggcgattttcagcggcctgctgttcctgaccttaccgactgacgggcagggcggaagcttcatggcgttcttcgcggtcttcctggcgctgttcctgacagctgggctgggtagtggttccactttccagatgattagtgtgatcttccgtaaactgacaatggatcgcgtgaaagcagaagggggttctgacgaacgtgcgatgcgtgaagcggcaaccgacacggcggcggcgctgggtttcatctctgcgattggcgcgattggtggcttctttatcccgaaagcgtttggtagcagcctggcattaacgggtagcccagtcggcgcaatgaaggtatttttgattttctatatcgcctgcgtagtgattacctgggcggtatatggtcggcattctaaaaaataaaccgttactcgtcatacttcgggttacatgtgctgcggctgcgttcattcaccccagtcacttactttagtaagctcctgggattcattcacttgccgccttcctgtaaaccgaattatatagagtaaaatatttgattatcctttgcgcggcatgatgtcgcgctttttttatgcgtcatttagttacaacatactaatgttatatggtttatttcgccggatttcattaagagccattaatatgttacccatggggaatactccttaatacccatctgcataaaaatcttaatagtttaaataactacaggtataaaacgtcttaatttacagtctgttatgtggtggctgttaattatcctaaaggggtatcttaggaatttactttatttttcatccccatcactcttgatcgttatcaattcccacgctgtttcagagcgttaccttgcccttaaacattagcaatgtcgatttatcagagggccgacaggctcccacaggagaaaaccgatgagtaaattcctggaccggtttcgctacttcaaacagaagggtgaaacctttgccgatgggcatggccagcttctcaataccaaccgtgactgggaggatggatatcgccagcgttggcagcatgacaaaatcgtccgctctacccacggggtaaactgcaccggctcctgcagctggaaaatctacgtcaaaaacggtctggtcacctgggaaacccagcagactgactatccgcgtacccgtccggatctgccaaaccatgaacctcgcggctgcccgcgcggtgccagctactcctggtatctttacagtgccaaccgcctgaaatacccgatgatgcgcaaacgcctgatgaaaatgtggcgtgaagcgaaggcgctgcatagcgatccggttgaggcatgggcttctatcattgaagacgccgataaagcgaaaagctttaagcaggcgcgtggacgcggtggatttgttcgttcttcctggcaggaggtgaacgaactgatcgccgcatctaacgtttacaccatcaaaaactacggcccggaccgtgttgctggtttcagcccaattccggcaatgagcatggtttcttacgcaagcggtgcacgctatctcagcctgattggcggtacttgcttaagcttctacgactggtactgcgacttgcctcctgcgtctccgcaaacctggggcgagcaaactgacgtaccggaatctgctgactggtacaactccagctacatcatcgcctgggggagtaacgtgccgcagacgcgtaccccggatgctcacttctttactgaagtgcgttacaaagggaccaaaactgttgccgtcacaccagactacgctgaaatcgccaaactgtgcgatctgtggctggcaccgaaacagggcaccgatgcggcaatggcgctggcgatgggccacgtaatgctgcgtgaattccacctcgacaacccaagccagtatttcaccgactatgtgcgtcgctacaccgacatgccgatgctggtgatgctggaagaacgcgacggttactacgctgcaggtcgtatgctgcgcgctgctgatctggttgatgcgctgggccaggaaaacaatccggaatggaaaactgtcgcctttaataccaatggcgaaatggttgcgccgaacggttctattggcttccgctggggcgagaagggcaaatggaatcttgagcagcgcgacggcaaaactggcgaagaaaccgagctgcaactgagcctgctgggtagccaggatgagatcgctgaggtaggcttcccgtactttggtggcgacggcacggaacacttcaacaaagtggaactggaaaacgtgctgctgcacaaactgccggtgaaacgcctgcaactggctgatggcagcaccgccctggtgaccaccgtttatgatctgacgctggcaaactacggtctggaacgtggcctgaacgacgttaactgtgcaaccagctatgacgatgtgaaagcttataccccggcctgggccgagcagattaccggcgtttctcgcagccagattattcgcatcgcccgtgaatttgccgataacgctgataaaacgcacggtcgtagcatgattatcgtcggtgcggggctgaaccactggtatcacctcgatatgaactatcgtggtctgatcaacatgctgattttctgcggctgtgtcggtcagagcgggggcggctgggcgcactatgtaggtcaggaaaaactgcgtccgcaaaccggctggcagccgctggcgtttgcccttgactggcagcgtccggcgcgtcacatgaacagcacttcttatttctataaccactccagccagtggcgttatgaaaccgtcacggcggaagagttgctgagtccgatggcggacaaatcccgctataccggacacttgatcgactttaacgtccgtgcggaacgcatgggctggctgccgtctgcaccgcagttaggcactaacccgctgactatcgctggcgaagcggaaaaagccgggatgaatccggtggactatacggtgaaatccctgaaagagggttccatccgttttgcggcagaacaaccagaaaacggtaaaaaccacccgcgcaacctgttcatctggcgttctaacctgctcggttcttccggtaaaggtcatgagtttatgctcaagtacctgctggggacggagcacggtatccagggtaaagatctggggcaacagggcggcgtgaagccggaagaagtggactggcaggacaatggtctggaaggcaagctggatctggtggttacgctggacttccgtctgagcagcacctgtctctattccgacatcattttgccgacggcgacctggtacgaaaaagacgacatgaatactagcgatatgcatccgtttattcacccgctgtctgcggcggtcgatccggcctgggaagcgaaaagcgactgggaaatctacaaagccatcgcgaagaaattctccgaagtgtgcgtcggccatctgggtaaagaaaccgacatcgtcacgctgcctatccagcatgactctgccgctgaactggcgcagccgctggatgtgaaagactggaaaaaaggcgagtgcgacctgatcccaggtaaaaccgcgccacacattatggtcgtagagcgcgattatccggcgacttacgaacgctttacctctatcggcccgctgatggagaaaatcggtaatggcggtaaagggattgcctggaacacccagagcgagatggatctgctgcgtaagctcaactacaccaaagcggaaggtccggcgaaaggccagccgatgctgaacaccgcaattgatgcggcagagatgatcctgacactggcaccggaaaccaacggtcaggtagccgtgaaagcctgggctgccctgagcgaatttaccggtcgtgaccatacgcatctggcgctgaataaagaagacgagaagatccgcttccgcgatattcaggcacagccgcgcaaaattatctccagcccgacctggtctggtctggaagatgaacacgtttcttacaacgccggttacaccaacgttcacgagctgatcccatggcgtacgctctctggtcgtcagcaactgtatcaggatcaccagtggatgcgtgatttcggtgaaagcctgctggtttatcgtccgccgatcgacacccgtagcgtgaaagaagtgataggccagaaatccaacggcaaccaggaaaaagcgctcaacttcctgacgccgcaccagaagtggggtatccactccacctacagcgacaacctgctgatgctgactttaggtcgcggtggtccggtggtctggttgagtgaagccgatgccaaagatctgggtatcgccgataacgactggattgaagtcttcaacagcaacggtgctctgactgcccgtgcggttgtcagccagcgtgttccggcagggatgaccatgatgtaccacgcgcaggaacgtatcgttaacctgcctggtagcgaaattacccaacagcgtggtggtatccataacagcgtcacccgtatcacgccgaaaccgacgcatatgatcggcggctatgcccatctggcatacggctttaactactatggcaccgtaggttctaaccgcgatgagtttgttgtagtgcgtaagatgaagaacattgactggttagatggcgaaggcaatgaccaggtacaggagagcgtaaaatgaaaattcgtagtcaagtcggcatggtgctgaatctcgataagtgcatcggctgccacacctgtagtgttacctgtaaaaacgtctggaccagccgtgaaggcgtggaatatgcgtggttcaacaacgtggaaaccaagccgggccagggcttcccgactgactgggaaaaccaggaaaaatacaaaggcggctggatccgtaaaatcaacggcaaactgcagccgcgcatgggtaaccgtgccatgctgctgggtaaaatcttcgctaacccgcatctgccggggatcgacgattattacgagccgttcgattttgactatcagaacctgcataccgcgccggaaggcagcaaaagccagccgattgcccgtccgcgtagcctgattaccggggaacggatggcgaaaatcgaaaaagggccgaactgggaagatgacctgggcggtgagtttgacaaactggcgaaagacaagaacttcgacaacatccagaaggcgatgtatagccagttcgaaaacaccttcatgatgtatttgccgcgcctgtgcgaacactgcctgaacccggcatgtgtggcgacctgcccgagcggtgcgatttacaagcgtgaagaagatggcatcgtcctgatcgaccaggataaatgccgtggctggcgtatgtgcatcactggatgcccgtacaaaaaaatctacttcaactggaagagcggtaagtctgagaagtgcatcttctgctatccgcgtattgaagcgggtcagccgaccgtgtgcagtgaaacctgtgtcggtcgtatccgttatcttggcgtgctgttgtacgatgccgacgctattgaacgtgcagccagcaccgagaacgagaaagatctttaccagcgtcagctggacgtgttcctcgatccgaacgatccgaaagtcatcgagcaggcgattaaagacggtattccgctgagcgttattgaagccgcacagcagagcccggtttataaaatggcaatggaatggaaactggcgctgccgctgcatccggaatatcgcacactgccgatggtctggtacgtgccgcctctgtctccgattcagtctgcagcagacgcgggtgagctgggtagcaacggcattctgccagacgtcgaaagcctgcgtattccggtacagtatctggcgaatctgctgaccgccggtgataccaaaccggtactgcgcgcactgaaacgtatgctggcgatgcgtcattacaaacgtgctgaaaccgttgacggtaaagttgatacccgtgcgctggaagaggtcggtctgaccgaagcccaggcacaggagatgtaccgttatctggcgattgctaactacgaagatcgctttgtggtgccgagtagtcatcgtgaactggcacgggaagccttcccggagaaaaatggctgcggctttacctttggtgatggctgccacggtagtgataccaaattcaatctgttcaacagccgtcgtatcgatgccatcgatgtgaccagcaaaacggagccgcatccatgatcgaactcgtgattgtaagccgtctccttgaatatccggatgctgccttatggcagcatcaacaagagatgtttgaggcgattgccgcgagcaaaaatctgccaaaagaggatgcccatgcgctgggcattttcctgcgcgatttaacgacgatggatccgctcgatgcccaggcgcagtacagcgaactgttcgaccgtggccgcgccacgagtctgttgctgtttgaacatgtgcacggcgaatcccgcgaccgcggccaggcgatggtggacctgctggcgcagtacgagcagcacggcttgcagttaaacagccgcgaattgccggaccatctgccgctgtatctggagtacctggcgcagctgccgcaaagcgaagccgtggaaggtttgaaagatatcgcgccgattctggcattgctgagcgcgcgtctgcaacagcgtgaaagccgttatgccgtgctgtttgatctgctgctgaaactggcgaataccgctatcgacagcgacaaagtggcggaaaaaattgccgacgaagcgcgcgatgatacgccgcaggcgctggatgctgtctgggaagaagagcaggttaaattctttgctgacaaaggctgcggtgatagtgcaatcactgcgcatcagcgtcgctttgccggtgccgtcgcgccgcaatatctgaatatcaccaccggaggacagcactaatgcaattcctgaatatgttcttctttgatatctacccgtacatagccggggcggtcttcctgattggtagctggctgcgttatgactacgggcagtacacctggcgcgcggcgtccagccagatgctggatcgcaaagggatgaacctggcgagcaacctgttccatatcgggattctggggatttttgtcggtcacttcttcggtatgctgacgccgcactggatgtatgaagcctggctgccgattgaagtgaaacagaaaatggcaatgtttgctggtggtgccagcggcgtgctgtgtctgattggcggcgtgctgttgctgaaacgtcgtctgttcagcccacgcgtgcgtgcaaccactaccggagcggatatcctgatcctgagcctgctcgttatccagtgcgcgctgggcctgttgaccattccgttctccgctcagcatatggacggtagcgagatgatgaaactggttggctgggcgcagagcgtggtgaccttccacggtggcgcttctcaacacctcgatggtgtggcgtttatcttccgtctgcacctggtgctggggatgacgttattcctgctgttcccgttcagccgtctgatacacatctggagcgtaccggtggagtatctgacacgtaagtaccagctggtgcgcgctcgtcactaagcgaattttagttcacatagaccctgcttcggcggggtttttttatgggcacggtgcggggtgagttgtcggatgcgcttcgcttatccgacctacaggggaggatattgtaggcccggtaaacgtggtgccatcgggcaaaattagctcggagtaacaggttttgattatttaaggaagcgatggtggtgggggaaggattactcagcgctgcgcgcttcgcccttcgggtcgttgcctgcggcaacgctctcagcctggcgctcaagagcaaccttggtcgaagcttcagttccttccccgcttgggcagaatatttgattgcggatagctttgagaattccggggcttttgaaagtgatggtggtgggggaaggattactcagcgctgcgcgcttcgccctagcggtcgttgcctgcggcaacgctctctcgctgacgctcgagccgaaccttaatcgaagcttctcatccttccccgcatgggcagaatatttgattgcggattcgcttgagagttcagggacttttgaaagtgatggtggtgggggaaggattactcagcgctgcgcgcttcgcccttcgggtcgttgcctgcggcaacgctctctcgctggcgctcgagtgctaccttggtcgaagcttctcatccttccccgcatgggcagaatatttaattgcggattcgttgggaagttcagggacttttgaaagtgatggtggtgggggaaggattcgaaccttcgaagtcgatgacggcagatttacagtctgctccctttggccgctcgggaaccccaccaggggtaattcaaattttgaggtaatgcttgagatggtggtgggggaaggattattcgtcgcttcgctcctcacccttcgggccgttgcctgtggcaacgttctctcgctttcgctcgaatcgaaccttagtcgaaggttctcacccttccccgatgagtgcaaactttcacaatctcaccgaagttaccacatcgctgtggtgaattatggtggtgggggaaggattcgaaccttcgaagtcgatgacggcagatttacagtctgctccctttggccgctcgggaaccccaccacggggtaatgctttttactggcctgctcccttatcgggaagcggggcgcatcatatcaaatgacgcgccgctgtaaagtgttacgttgagaaaaatgaactggttgcgtaattttcatccgtaacggattaaaggtaaccagttatttttgctggcgattaaagaataatcgttcgattaccgtaaacaaagacgcgctgtgccagtactttgtatagtgcacgacttaagacgtttttctcgacgtcacgacctgcgcgcatcatatcttcagctgtgtaggtatgatcgacatgaataacgtcctgcatgatgattgggccttcgtccagattgtcattcacatagtgagcggttgcgccaataatcttcacaccacgttcataggcctggtgataaggacgtgcgccaataaacgctggcaggaaactatggtgaatattgatgatcttattcgggaagcgtgccacaaattccggcgttaatacccgcatatacttcgccagcaccacgtagtcaggttgataagcatcaatggcatccgccatcttttgatcgtgctcgttgcgggttaacccttcatggcttaccagctcaaacggaatatcaaaacgctcaaccagagaacgtaaagtatcgtggttaccaataactgccgcgatttcgacatccaggccgccgtaattggctttcatcaacaaatcgccaaggcaatgcgcttctttagtgaccagaatcactatccggcgacgaccggcaggattcagctcacgcacggagccttctggcaatgcgctatcgagatccgccagcagggtggaatcattaaaaatcccttccagttccgtgcgcataaaaaagcgcccggtacggtgatcaacaaattcattgttctgtacgatatttaactcgtgcttgtagcaaatattggtaatacgtgcgatcagacctttttggtccggacaaatagtacgcagaactttacgttggagactatgcattgctggaaaaaccttgttgagagtgtttgctaaaccgtaccgtcaaccattattggccgcagcactttttaaattttttaccactaccacaagggcagggatcgttgcgaccaaactgcggacgtgtaccgtcaatatagtaccattgaccgttttctttcaaaaatcggctacgttcaattattgcacctgttttaccaccttcggtaaatcgagcaacaaaactgacaaatccgatattgtcggcgtcctgccaacaatgttcaaatacggtcaatcccaaccattcagtatgcgcaaatccggccatcaattcggcacgtaacgccgctgctccacaagagggatgccaggtctttattaaataatctgcgtcttgcatcacaaaagcgcagtaacggctacgcatgagatgttctggatcaggtgcaaccttttcaccagacacataagggtggcaacataggctatactcgacagcactaccacagggacaaagctgagacacaaataatctccctggaaacaataacggcgtattaaccgcctgagtagcactatgttaaccgagcagtagcgatgtggctacgattgcattccaggggaatcttgcgggaataatgagaaagataaaaatagggctggcgctgggatctggcgcggcgagaggttggagccatattggcgttattaatgcgctaaaaaaagtgggtattgaaattgatatcgttgcaggatgtagtattggtagcctggtgggcgctgcctatgcatgcgatcgattatctgcgctggaagattgggtgacctctttcagttattgggatgttttacgcctgatggatctctcctggcagcgcggtgggttactgcgcggcgagcgtgtcttcaatcaataccgcgaaataatgccggaaacagagatcgaaaattgttcccgtcgctttgcggctgttgccaccaatttaagtacgggacgtgaattatggtttactgaaggcgatctccatcttgctattcgcgcaagttgcagtattccaggactcatggcacctgttgcacataacggctactggctggttgatggagcagtcgttaacccaattcctatttccctcacgcgtgcattgggggctgatattgtgatagcggttgacctgcagcacgatgctcatttgatgcaacaagatttgctctcctttaatgtcagtgaagaaaatagcgagaatggtgattctctgccgtggcatgcgcgtctgaaagaaaggttaggcagcataacgacacgtcgggcggtgacagcgccaacggcaacagagattatgaccacttctatccaggtgctggagaaccgccttaaaaggaaccgcatggcaggtgatccgcccgatattctgattcaacctgtttgcccgcaaatatctacgcttgatttccatcgcgcgcacgctgccattgcggccggacagctggcagtggaaaggaaaatggacgaacttttgccgttggtacgcaccaacatttgaccagaatttttatctacacttaagttaattctgacaggcgcaggtggcaatagcatgccactattgagtaaagccagtcaggggagagaacatgacgcagccattggtcggaaaacagattctcattgttgaagatgagcaggtatttcgcagccttctggatagttggttttccagtttgggagcgacaacggtactggcggctgatggggtggatgcccttgagttgctgggaggtttcactccagacctgatgatatgtgatatcgcgatgccacgaatgaacgggcttaaactgctggagcatatacgtaacagaggcgaccagaccccagttctggtgatatctgccactgaaaatatggcagatattgccaaagcgttacgtctgggcgttgaagatgttttgctgaaaccagttaaagatctgaatcgcttgcgcgagatggtttttgcctgtctctatcccagcatgtttaatagccgcgttgaggaagaggaaaggctttttcgcgactgggatgcaatggttgataaccctgccgcagcggcgaaattattacaggaactacaaccgccggttcagcaggtgatttcccattgccgggttaattatcgtcaattggttgccgcggacaaacccggcctggtgcttgatattgccgcacttagcgaaaacgatctggcattttattgccttgatgtcacccgagctggacataatggcgtacttgctgccttgttattacgcgcattgtttaacggattattacaggaacagcttgcacaccaaaatcaacggttgccagagttgggcgcgttattgaagcaggtaaaccatttacttcgtcaggccaatctgccggggcagtttccgctattagttggctattatcatcgcgaactgaaaaatctcattctggtttctgcgggtctgaatgcgacgttaaataccggcgaacaccaggtgcaaatcagtaatggtgttccgttaggcactttaggtaacgcttatttgaatcaattgagccagcgatgcgatgcctggcaatgccaaatatggggaaccggtggtcgactgcgcttgatgttgtctgcagaatgagcaaacgataacgcgggctaaatttgcattacctgctaatgtcggctggtggtactatcgtcgccattcgtataagtaattgtcttaattatgctaactcgcctccttttcagaacttagccccttcggggtgctgatatactgggatgcgatacagaaatatgaacacgttcaaaacacgaacagtccaggagaatttaaatggctgccattaatacgaaagtcaaaaaagccgttatccccgttgcgggattaggaaccaggatgttgccggcgacgaaagccatcccgaaagagatgctgccacttgtcgataagccattaattcaatacgtcgtgaatgaatgtattgcggctggcattactgaaattgtgctggttacacacagttctaaaaactctattgaaaaccactttgataccagttttgaactggaagcaatgctggaaaaacgtgtaaaacgtcaactgcttgatgaagtgcagtctatttgtccaccgcacgtgactattatgcaagttcgtcagggtctggcgaaaggcctgggacacgcggtattgtgtgctcacccggtagtgggtgatgaaccggtagctgttattttgcctgatgttattctggatgaatatgaatccgatttgagtcaggataacctggcagagatgatccgccgctttgatgaaacgggtcatagccagatcatggttgaaccggttgctgatgtgaccgcatatggcgttgtggattgcaaaggcgttgaattagcgccgggtgaaagcgtaccgatggttggtgtggtagaaaaaccgaaagcggatgttgcgccgtctaatctcgctattgtgggtcgttacgtacttagcgcggatatttggccgttgctggcaaaaacccctccgggagctggtgatgaaattcagctcaccgacgcaattgatatgctgatcgaaaaagaaacggtggaagcctatcatatgaaagggaagagccatgactgcggtaataaattaggttacatgcaggccttcgttgaatacggtattcgtcataacacccttggcacggaatttaaagcctggcttgaagaagagatgggcattaagaagtaacatccgtatcggtgttatccacgaaacggcgttgagcaatcgacgccgtttttttatagcttattcttattaaattgtcttaaaccggacaataaaaaatcccgccgctggcgggattttaagcaagtgcaatctacaaaagattattgcttgatcaggaaatcgtcgagggatttaccttgctcatccattgcttttttgattacagctggagtacggccttggccagtccaggttttagtttcgccgttttcgtcaacgtagctatattttgccggacgctgagcacgtttagctttggtgccagatttaacggcagcaaggctattcagcagttcgttcgggtcaataccgtcagcgatcagcatttcgcgatattgctgcagtttacgagtgcgctcttcaacttcagcagcagccgcgctttcttcttcgcgacgttcgttaacaacaacttctaatttttccagcatttcttccagcgtttcaagtgtacattctcttgcctgcgcacgaagagtacggatgttgttcagaattttaagtgcttcgctcattgtagtaatctcaaacttatattggggtggtttgttgaggtaataatagagccttaaattcagttgtgcaatagccaggaatgtaaggaattcaaaattgttctttattttgtgccgccaataaatatcttttcataaaattagccagaaaagacgcggcatatagccctatttacaccgatgatttcgcagcacgtgaggttaaaacttcctgattcatgtcacattttatggggagattatcgtaggctgacgacctttcagtcttctgtattagttgtgtttacgagaattccctattaagcgaatgatgaaaagtagaacagtcgcaataagagcatggacttagtattgcactatctcctggaggtcaacagagggctattacttgcgcaacaggttaaagattgtgaatagttaccagcagtcatttacccgcttataacaagcgaggcagttgtaatgatagctcagaaggattatgcaaggcttcgtaagggagaacgcatatacccacttctgtgcatactgttgagctgaaaaactgacgaattatgataaactccagccaactttatttcatatcattgagggcctgtggctgatggcacagctatatttctactattccgcaatgaatgcgggtaagtctacagcattgttgcaatctagttacaattaccaggaacgcggcatgcgcactgtcgtatatacggcagaaattgatgatcgctttggtgccgggaaagtcagtagccgtataggtttgagtagccctgcaaaattatttaaccaaaatagtagtttatttgatgagattcgtgcggaacatgaacagcaggcaattcattgcgtactggttgatgaatgccagtttttaaccagacaacaagtatatgaattaagcgaggttgtcgatcaactcgatatacccgtactttgttatggtttacgtaccgattttcgaggtgaattatttattggcagccaatacttactggcatggtccgacaaactggttgaattaaaaaccatctgtttttgtggccgtaaagcaagcatggtgctgcgtcttgatcaagcaggcagaccttataacgaaggtgagcaggtggtaattggtggtaatgaacgatacgtttctgtatgccgtaaacactataaagaggcgttacaagtcgacagtttaacggctattcaggaaaggcatcgccacgattaataagaatttctttactgacagggtgagcagggcacttttatcctgtcagttcgttttacgcacttcttccgggctatatacccttctcggcagttttttaacgccgctatacgcctcacagggctcttaagcaccgacgttgacttgtgacctgtaaagtacaatatccctgtgtttaggcgttatacatcgtcgcaaatatgatgaaggctaatgctgtcggtttatggaaaagttgctttgggtaaacaaaaaatacggccccagaagggcaatgccgttcacttaagaggagcggcactatgtttcacaggataacgggtttttgatatcttaaccgacctcggccttgatggtcgggggcgttttgttatgaacaccacttccagagcaccccgaagatgctccagtcgtttcgggatggtccctggtgacgccgtgtttcccagctctatcatttctgatgcgatattcttccacgcaggcagtagccagtggcggttacaacccttctggttcagcgtcagcagcaggtcttcgctgtaaaaaagtttatcaaacaacgtaatagagttatccgggatggtggcgagcatggagtgggccagcacagtttcgctctgccggtaaggtgcggtcacggcattcagcagaatgtgacttcccaggttcattaaggccaccagacgcataaccgggtaggcgttctgccgcttagtggatgtgttggcagacccataatattcacgcagctcgggtttatcaggtgtcctgaactgtgcgccatcaatggcaaaaagttgcaggccgtgccagtcatccttcaggtaacgttccgcgcccctgtctgtgcggtctggcggaagagccattccactggggcggcccccacgcgctgacgcgcctgggtgacagcgctgcgggccagcaggttcatccccgcttcgccatccgcgctcaggttcagacggcgaacaacatcggtaattggctcattgcaccaccatccagataaccatgtcccccggtaaacgacggcggcgaacggtcgcatgagcagaaagcgtcaggcagtgttgtatccactcggtgggaaggtgttctgcaaatagttgtgcagagggcggaggcataagcggatggtcactgaaatcgagcagatcattgagaagtggcataagaaaacggctccctgttgtggaagccgttatagtgcctcagtttaaggatcggtcaactaatccttaactgatcggcattgcccagaaggggccgtttatgttgccagacagcgctactgattaagcggattttttcgcttttttctcagctttagccggagcagcttctttcttcgctgcagtttcaccttctacataatcacgaccgtagtaggtatccagcagaatctgtttcagctcggagatcagcgggtaacgcgggttagcgccggtgcactggtcatcgaatgcatcttcagacagtttatccacgttcgccaggaagtctgcttcctgaacgccagcttcacggatagatttcggaatacccagttcagctttcagcgtttccagccatgccagcagtttctcgatcttagcagcagtacggtcgcccggtgcgctcagacccaagtggtcggcaatttcagcataacgacggcgagcctgcggacggtcatactggctgaatgcagtctgcttggtcgggttgtcgttcgcattgtagcgaataacgttacaaatcagcagggcgtttgccagaccgtgcggaatatggaactgggaacccagtttgtgcgccatactgtgacatacacccaggaaggcgttcgcaaacgcgatacccgcgatagtcgctgcactgtgaacacgttcacgcgctaccggatttttagacccttcgtggtaggacgctggcagatattctttcagcagtttcagtgcctgcagagcctgaccatcagagaactcagatgccagtacagaaacataagcttccatggcgtgagttactgcgtccagaccaccgaaagcacacagggacttcggcatgtccataaccaggttggcgtcgacaatcgccatatccggagtcagcgcatagtctgccagcggatatttctgaccagtagcgtcgtcagttacaaccgcaaacggagtgacttcagaacctgtaccagaagtggtggtgacagcgatcattttcgctttcacgcccattttcgggaacttgtagatacgtttacggatatccataaagcgcagcgccagctcttcgaagtgagtttccggatgttcgtacataacccacatgatcttcgcggcgtccatcggggaaccaccacccagcgcgataatcacgtctggtttgaaggagtttgccagttctgcacctttacgaacgatgctcagggtcgggtccgcttctacttcgaagaagacttcagtttcaacgcctgctgctttcagtacggaagtgatctgatcagcataaccattgttgaacaggaagcggtcagtcacgatgagcgcacgtttgtggccatcagtaatcacttcatccagcgcgattggcagggagccacggcggaagtagatagatttcggaagtttgtgccacaacatgttttcagctcgcttagcaacggttttcttgttgatcaggtgtttcggaccaacgttttcagagatggagttaccaccccaagaaccacaacccagagtcagggaaggtgcgagtttgaagttatacaggtcaccgataccaccctgagacgctggggtgttaatcaggatacgcgccgttttcattttctgaccgaagtaagaaacgcgagccggttggttatcctggtcagtgtacaggcaagaggtatgaccgataccgcccatagcaaccagtttctctgctttttctaccgcgtcttcgaaatctttagcgcggtacattgccagagtcggggacagtttttcatgtgcgaacggttcgctttcatcaacaacggtcacttcaccgatcagaatcttggtgttttctggtacagagaagcctgccagttcagcaattttataggctggctgaccaacgatagccgcgttcagcgcaccgtttttcaggataacatcctgaacagctttcagctctttaccctgcaacagatagccgccgtgggttgcaaaacgttcacgtacagcgtcataaacagagtcaacaacaacaacagactgttcagaagcacagattacgccgttgtcgaaggttttggacatcagtacagatgcaactgcacgtttgatatcagcagtttcatcgataacaactggagtgttgcccgcgcctacaccgatagctggtttaccggagctgtatgcggctttaaccatgcccggaccaccagtcgcgaggatcaggttgatgtctgggtggtgcatcagtgcgttagacagttcaacagaaggttgatcgatccagccgatcagatctttcggagcaccggcagcgatagcagcctgcagaacgatatcagccgctttgttggtggcatcttttgcacgcgggtgcggggagaagataatggcgttacgggtcttcagactgatcaggcttttgaagatagcagtactagtcgggttagtggtcggaacgataccgcaaataataccgattggttcagcgatagtgatggtaccaaaagtgtcgtcttcagacagaacaccacaggttttttcatctttataggcgttgtagatatattcagaagcaaagtggtttttgatcactttatcttcgacgatacccatgccggattcggcaacggccattttcgcgagtgggattcgagcatctgcagcagccagagcggcggcgcggaagattttgtctacttgctcttgagtgaaactggcatattcacgctgggctttttttacacgctctacgagtgcgttaagttcagcgacattagtaacagccataatgctctcctgataatgttaaacttttttagtaaatcatctgctcgaatacgagagtatagtcagtgcggtgatgatttgcttaacctatgaaaatcaaaagcttactcgcgctcacactcactgtgatttactaaaagagtttaaacattagagttattatctctaatgcgtcacttccaggtggcgtaagcaagattactcacttctgggtactgattacgtgatccaaatcaaatttttgcaaagctgacacctttcagcatcgcttttcgccattatagctaacagttaataaattgtagtatgatttggtggctacattagcatgttttgcacaactagataacaataacgaatgatagcaattttaagtagttaggaggtgaaaaatgctgtcaaaaggcgtattgtcagcgcgtcttttcaaccttatttatggctaacattatccggcttttgcttcggagctaaccgtgattcagaccttttttgattttcccgtttacttcaaatttttcatcgggttatttgcgctggtcaacccggtagggattattcccgtctttatcagcatgaccagttatcagacagcggcagcgcgaaacaaaactaaccttacagccaacctgtctgtggccattatcttgtggatcagcctttttctcggcgacacgattctacaactttttggtataagtattgatagcttccgtatcgccgggggtatcctggtggtgacaatagcgatgagcatgatcagcggcaagcttggcgaggataaacagaacaagcaagaaaaaagtgaaaccgcggtacgtgaaagcattggtgtggtgccactggcgttgccgttgatggcggggccaggggcgatcagttctaccatcgtctggggtacgcgttatcacagcattagctatctgtttggtttctttgtggctattgcattgttcgctttatgttgttggggattgttccgcatggcaccgtggctggtacgggttttacgccagaccggcatcaacgtgattacgcgtattatggggctattgctgatggcattggggattgaatttatcgttactggtattaaggggattttccccggcctgcttaattaattcctttcaaatgaaacggagctgccatgctccgtttacttcgtcattatttttactttgttcccgcgcagttatcaaaagcaaaaggaataggtaaaaatattcttctcaaattacagttagttataaggatttccttaactgcttctcctcaccatcatgttattttcgccacatcataatcctgggcttgctgaagaataattgaaatgatattattaattccactgcctttggtagaggaaagtgctaaataataatcaattgttaaattattgtgcatttcactactggaactgtaatcagaaaagatagacatgcttagccaatctctatttgattgaattgaaagatgtttgttaaggcatggatgcaagctatagattctgatacggtcaataaaagagaattgcttaacaattttgcaaaatgtattggcgagtaagaaccgcatttggtactttccgggcaaccgccagacgattctttattggtaatgagaataattaacaattaaagagcgtcgcgaaagaataatgtgtctcgacaggggagacacagtacgaatcgacataaggtgatcgtctgaatcaccagaataaataaagtcggtgatagtaatacgtaacgataaagtaacctgacagcagaaagtctccgagcctgtgcagggtcccaatccgggattacacatgctggttaataccagtaattataatgagggagtccaaaaaacaatgaccaacatcaccaagagaagtttagtagcagctggcgttctggctgcgctaatggcagggaatgtcgcgctggcagctgatgtacccgcaggcgtcacactggcggaaaaacaaacactggtacgtaacaatggtagtgaagttcagagtttagatccgcacaaaattgaaggtgttccggagtctaatatcagccgagacctgtttgaaggcttactggtcagcgatcttgacggtcatccagcacctggcgtcgctgaatcctgggataataaagacgcgaaagtctggaccttccatttgcgtaaagatgcgaaatggtctgatggcacgccagtcacagcacaagactttgtgtatagctggcaacgttctgttgatccgaacactgcttctccgtatgccagttatctgcaatatgggcatatcgccggtattgatgaaattcttgaagggaaaaaaccgattaccgatctcggcgtgaaagctattgatgatcacacattagaagtcaccttaagtgaacccgttccgtacttctataaattacttgttcacccaagtactagtccggtgccaaaagccgctatcgagaaattcggcgaaaaatggacccagcctggtaatatcgtcaccaacggtgcctataccttaaaagattgggtcgtaaacgaacgaatcgttcttgaacgcagcccgacctactggaacaacgcgaaaaccgttattaaccaggtaacctatttgcctattgcttctgaagttaccgatgtcaaccgctaccgtagtggtgaaatcgacatgacgaataacagcatgccgatcgaattgttccagaagctgaaaaaagagatcccggacgaagttcacgttgatccatacctgtgcacttactattacgaaattaacaaccagaaaccgccattcaacgatgtgcgtgtgcgtaccgcactgaaactaggtatggaccgcgatatcattgttaataaagtgaaagcgcagggcaacatgcccgcctatggttacactccaccgtatactgatggcgcaaaattgactcagccagaatggtttggctggagccaggaaaaacgtaacgaagaagcgaaaaaactgctggctgaagcgggttataccgcagacaaaccgttgaccatcaacctgttgtataacacctccgatctgcataaaaagctggcgattgctgcctctagtttgtggaagaaaaacattggtgtaaacgtcaaactggttaaccaggagtggaaaacgttcctcgacacccgtcaccagggtacttttgatgtggcccgtgcaggctggtgtgctgactacaacgaaccaacttccttcctgaacaccatgcttagcaacagcagcatgaataccgcgcattataagagcccggcctttgacagcattatggcggaaacgctgaaagtgactgacgaggcgcagcgcacagctctgtacactaaagcagaacaacagctggataaggatagcgccattgttcctgtttattactacgtgaatgcgcgtctggtgaaaccgtgggttggtggctataccggcaaagatccgctggataatacctatacccggaatatgtacattgtgaagcactaatggcaatacgtggggcaggagtgtcctgctccacggtgtctgatttttatcgcattacagaaggcacaggccagaaggtagggcaatgttaaaatttattctacgtcgctgtctggaagcgattccgatgctatttattcttattactattagcttctttatgatgcgcctcgcgccgggaagcccttttaccggcgaacgtactttaccgccagaagtgatggccaatatcgaagcgaaatatcatcttaatgatccgatcatgacacagtatttcagctacctgaaacaactggcgcacggtgatttcggtccaagctttaaatataaagattatagcgtcaatgacttggttgcatccagttttcccgtttctgccaaactgggagccgcagcatttttccttgcggtaatactgggtgttagtgctggcgttattgccgcattaaaacaaaacaccaaatgggactataccgtgatggggctggcaatgaccggggttgttatccccagttttgtggttgcaccattattagtcatgatatttgcgatcattttgcattggctgccgggcggtggctggaatggtggggcgcttaaattcatgatattgccgatggtggcgttgagtctcgcttatatcgccagtattgcgcgtattacccgtggctctatgattgaagtattacactccaattttattcgtactgcccgggcgaaagggttacctatgcggcggatcattttacgtcacgcattaaaacctgctctgttacccgtgctctcttatatgggccccgcatttgtcggcattattaccggttctatggttatcgaaaccatttatggtttgccggggattggacaactgttcgttaatggcgcattgaaccgtgactattccttagtgttaagcctgaccatcctggttggtgctttaaccattttgtttaatgccattgtcgatgtgctatatgcggttatcgacccgaaaatccgttactgatactggagctcgcgatgatgttaagtaagaaaaacagcgagacgctggaaaatttcagtgaaaagctggaggtcgaagggcgcagcttgtggcaggacgcacgtcgacgttttatgcataaccgtgcggcggttgccagtctgatagtgctggtgctgatcgcgttatttgtaatcctggcaccgatgctttcccagtttgcctatgacgatactgactgggcgatgatgtccagcgccccggatatggagtccggtcactactttggtactgacagttccggtcgcgacctgcttgtgcgcgttgcgattggcgggcgtatcagtctcatggtcggtgttgctgcggcactggtggctgtggtcgtcgggacactttatggtagcctttccggttatctgggcggtaaagtggatagcgtaatgatgcgtctgctggaaatcctcaactccttcccattcatgttcttcgtcattttgctggtgacctttttcggtcaaaacatcctgctgattttcgtggcgataggcatggtttcctggctggatatggctcgtattgtgcgtgggcaaaccctgagtctgaagcgcaaagagtttattgaggcggcacaagttggcggtgtaagcacaagcggcattgttattcgccacattgtgccgaatgtactcggtgtggtggtggtctacgcaagtcttctggtgcccagcatgatcctctttgaatctttccttagcttcctggggttgggtacgcaagagccgttaagcagctggggtgcattgctgagtgatggcgcgaacagcatggaagtctctccatggttattgttgttcccagcgggattcctcgtggtgacgctgttttgtttcaactttatcggcgatggcttgcgtgatgccctcgacccgaaagatcgttaaggagtgcagccatgagcgtaattgaaactgcaactgtgccgctcgcacaacaacaggctgacgcactgctgaacgtgaaagatttgcgtgtcacctttagtaccccggacggcgacgtcacggcggtcaatgatttgaatttttccctacgtgccggagaaacgctgggtattgtaggtgagtctggtagcggtaaaagccaaactgcatttgcgttgatgggcctgttggctgccaacggacgtattggcggaagcgcaaccttcaatgggcgtgaaatcctcaatttgccagagcatgaactcaataaactgcgcgctgaacaaatcagtatgatttttcaggacccaatgactagcttgaatccctatatgcgcgtcggtgagcagttgatggaagtgctgatgctgcataagaacatgagcaaagctgaggcgtttgaagagagcgtgcggatgctcgatgcggtaaaaatgccggaagcgcgtaaacgcatgaaaatgtacccgcacgaattttctggcggcatgcgtcagcgagtcatgattgcgatggccttgttatgtcgacctaagctgctgattgcggatgaaccaacaactgcgctggacgtcaccgtacaggcgcagatcatgacgctattaaatgaactgaagcgggaatttaataccgccatcattatgatcacccacgatcttgtcgtggtggcggggatctgcgacaaagtgctggtaatgtacgccgggcgcacgatggaatatggcaacgcgcgcgatgtcttttatcaacccgttcatccttattctatcggtttgctcaacgcggtgccgcgtctcgatgcggaaggtgaaacaatgttgaccatcccgggtaatccgccaaacctgctgcgattaccgaaaggttgcccgttccagccacgttgtccgcatgcgatggaaatttgtagtagcgcaccgccgctggaagagtttacgcctggccgtctgcgtgcttgctttaaaccggtggaggaactgttatgaatgctgtaactgaaggaagaaaagtcctccttgaaatcgccgatcttaaagtgcactttgaaatcaaagatggcaaacagtggttctggcaaccgccgaaaacgctcaaagccgtcgatggtgtcactcttcgcctgtatgaaggggaaacattaggtgtggtaggggaaagcggatgcggtaagtccacctttgctcgcgccatcatcggtttggtcaaggcgaccgacggtcatgttgcctggttaggtaaagagttgctgggcatgaaacccgatgaatggcgtgccgttcgcagtgatattcagatgattttccaggatccgttggcaagcctaaacccgcgtatgaccatcggcgagatcatcgctgaaccactgcgtacttatcatccgaaaatgagtcgccaggaagttcgcgagcgcgtgaaggcgatgatgctgaaagtcgggttattgcctaacctgattaaccgctatccgcatgagttctctggtgggcagtgccagcgtatcgggattgcgcgtgctcttattcttgaaccgaagctgattatctgtgatgagccggtgagcgcgctggacgtgagtattcaggcacaggtggtcaacctgctccagcaattgcaacgtgagatgggattgagtttaatttttatcgctcatgacctggccgtggtaaaacacatttccgatcgtgtgttggtgatgtatctcggccatgcggtagaactggggacctatgatgaggtctaccacaatccactacatccttacaccagggcattgatgagcgcagtccccatacctgatccggatctggagaagaacaaaaccatccagttactggaaggggaattaccgagcccgatcaacccgccttccggttgtgttttccgtacccgttgcccgattgccggtccagagtgcgccaaaacacgtcctgttctggaggggagtttcagacactccgtttcttgcctgaaagtcgatccgctttaaaaacaataagggctgacagttgtcagccctttttcacgctaaaagcgattatttattcccgccagatgatatggcaaagtttgtgatctttttcgcggcataacagaatgcgggcaaaaacatcgttgatttcaccatcttcactgtccgccagaccaatcaccacttcggcaaaaaagtccgggttcaaatcgaaatcaacatgttcctgccagtcttccgccggatcgaataactccgcgccgccgcgctcttcaaactgaagattgaacagcaggacatcagctggatcgagattgtcggcagccagttcgagaaaaatatcgtaggcctgttcaagcgtttcatcttcagtcaggcgattgtttagatccatatccatagttactacctgtttaacctctgttggcgacgttttacagcaacggactgaagaagtaaaacagtcgctcggcgacacgttgccataatggacgttttagccataaacgggcatcgagcagacgactacggctaatataatcgtcctgaacggcggcgaggtcagcaccaaaacctttatcgtcgattgccagggtaatctcgaaatttagccacagactacgcatatcaaggttaactgtgccaaccagacttagttcgccatcgaccagcacgctcttggtatgcagtaacccgccttcaaactgataaattttaaccccagcagccagcagttccgtaaagaatgcgcgactggcccagccgaccagcatgctgtcattttttcgcggaaggataatactgacatccaccccgcgctgcgccgccgtgcaaatcgcatgaagtaaatcatcgcttggcacaaagtagggcgtggtcatgatcaaatattcacgcgcgctataagccgcagtcaataatgcctggtgaatgagatcttccggaaagccggggccagaagcaattgtgtgaatggtgtgaccgctggcctgttcaaacggcataatattgacatctggtggtggcggcagaatacgttttccggtttcaatctcccagtcgcaggaataaataatccccatcgcggtggcgatagggccttccatacgcgccatcagatcaatccattgccctacgcccgcatcttgtttgaagtagcgaggatcgaccatattcatgctgccggtgtacgcgatgtaattatcgatcatgatcatcttgcgatgttggcgcaggtccatacggcgtaaaaacacacgcatcagattgacctttaaggcttcgaccacttcaataccggcattacgcattagctcgggccacgggctgcggaaaaaagccacactcccggcggagtcgagcatcaatcggcaatgaatgccgcgtcgcgcagccgccattaaactttcagccacctggtccgccatgccgccgggctgccagatataaaacaccatctcaatattatggcgcgcgagctggatgtcgcggattaacgcctgcatcacatcatcactctcggtcatcagttgtagctgattccctttgaccccagcgatcccctgacgacgctcgcaaagcttgaataatggcgcagcgacactgctattttcttcggcgaagatatgcttacaggctttaaggtcgttaagccattttgcggtggaaggccacatcgctctggcgcgctcagcgcggcgtttgcctaaatggagctcgccaacggcaagataggcaataattccgactaacggcagaatgtaaataatcaacagccaggccatcgcggagggaactgcgcgtcgtttcattagaatgcgtaaagttacgcctgcaatgagcaaccagtatcccagaatggccaaccaactcaccaacgtataaacggttgtcatagattagaaatccttttgaaagcgcattgttatgagtttacgcatatggattcatctggcaaataaaaacgcgggaaaagcactggtcagcgtcgggggtgggggtataatgaccattctgttattgcatagagtagttaacatgaagcggagtagaacggaagtggggcgctggcgcatgcagcgtcaggctagccgacgtaaatcgcgttggcttgaggggcaatcgcgccgaaatatgcgtatccacagcatcaggaagtgcattctaaacaaacagcgtaactcgttattgtttgcgatctacaatatctaaatgtactgggcaccattgcggtgcccaataagtttactcttccgtctttaaactttatttttgcgcgctttctttactgtcagctttcgtttctagttcatcgttatcgctgaaaataccatgaccactgttcaacaacatactaacgagcatatcattattaatctcttcaccatttaaaactcgcgccagaatttcgctgccaaacagttgcggactgagaatgatatccggatgtaccatcttaatcttattcaggtttttgctatcactgacggcgagaactgttttgacatcactgctcatatcttttgcgctgagtacaacaaacgcgttatctgcatcgttatcactcagcgccagaatggcccggcaacgatcgattcccgctttctttaatacagaactgtcattactgtcaccggggataacatcagcattatcgcctaagcgttgctcaagttgcttgatatcatcttcaggcaagttgctgataaccgttacgttttgtccgcgttgattcagttgcaggatcgtattgatggcgagaatgctatgtccgcaaacaataaaatgatctttacgatgcattgtatgattgtttccttttacaagtttgttgaatcccccgcggataagcggaccaaaaatactggtcatagatgtggcaaaaacggtaatgccggaaataatgacgctaatagtgaacaatcgtgcactttcagaaacagggacaatatcgccatagccgacggtactcatggtttctatgctaaaatagaacgcggtcatcaaactttctattcgcggattaaaaccttcgcttaaataaagcgcaccgtaggtactgtaaaacagtaatgtcgtgaaactaataaatgcaaaaattgtcccggctgcggcgctactgtgggagaagtctttgcgcagtatcagcaaaaacaccagcgtaaaaatgcaaaatccaatactaaatttcagccagggataaaaatgcagggtgtaaattagcgctatcaacaacaaaatgatactgattgcccatgcgagctttgcccggaacagtaagccaatggagttcaggacaagaaagacgccgagcataaagagtggggcgtttgccagcaaggagagatccaactcactaaatgctttgatatggaaaatatcaagcaaattgacgctcataccatagattgttttaaaaataagcaatccatttaaaaagacggccagcgcgagaatgtcgtgccgaagggtcacccataaatttgttgctgtttgtttgaatgtagcccagtgactcactgatacctctgtaaccacaattttgtttaattatcttagcgtgcacattttctgaacatacatgcagcgcgtgaatgtgttaaacaatagtagatgactttatccgcagtaatcaaaggatttgagcgagcaactgtacctcaggaaaggtcatttttcctgaatatgctcacatcatataaagaaatacagataaagttattatctgcttgtggtggtgaatgcactgaccggctataaggaaaggccaaacaagaacacggttgcaaaaaccgtgcccttaaatattgaatctctattcagaacactttcttaaatggtttcacactaacgtgttcatagactcctgccgctacgtacgggtcagcatcggcccaggcctgagctgcttccaggctttcaaattcagcaataacggtactgccagtaaatcccgcagcccctggatcgttactgtctaccgctggcattggaccagctgtcaacaaacgaccttcatcatgcagtaactgtaaacgtgctaaatgtgccggacgaacggaaaggcgtttttcgaggctatcagctttgtcttgagcgtaaataacatacaacacgggcacaactccttgttcgggaaagttgtaaagtacgttatttgaaagggcgaagatctgcaacggaaagatgatgtctttgttaaggccatgcataaagtaagggtaattacgccaaaaatgacattttcactgatcctgatcgtcttgccttattgaatatgattgctatttgcatttaaaatcgagacctggtttttctactgaaatgattatgacttcaatgacccttgatttacctcgccgcttcccctggccgacgttacttagcgtctgcattcatggtgctgttgtggcgggtctgctctataccagcgtacatcaggttattgaactacctgcgcctgcgcagccgatttctgtcacgatggttacgcctgctgatctcgaaccgccacaagccgttcagccgccaccggagccggtggtagagccagaaccggaacctgagccgatccccgaaccgccaaaagaagcaccggtggtcattgaaaagccgaagccgaaacctaagccaaaaccgaagccggtgaaaaaggtacaggagcagccaaaacgcgatgtcaaacccgtagagagccgtccggcaagtccgtttgaaaatacggcaccggcacgcctgacaagtagtacagcaacggctgcaaccagcaagccggttaccagtgtggctagtggaccacgcgcattaagccgtaatcagccgcagtatccggcacgagcacaggcattgcgcattgaagggcaggttaaagttaaatttgacgttacgccggatggtcgcgtggataacgtacaaatcctcagtgccaagcctgcgaacatgtttgagcgtgaggtgaaaaatgcgatgcgcagatggcgttatgagccgggtaagccaggcagtgggattgtggtgaatatcctgtttaaaattaacggcaccaccgaaattcagtaagcagaaagtcaaaagcctccgaccggaggcttttgactattactcaacaggtaaggcgcgaggttttccttcaggatcaaccgcgacatacttaaataatgcttctgtcgctttatagcgttgcccaattggttcagacgctacttttttcacccacacttcaatattaatgctgacgcttgtcgtccctttctggacacagcgtgcatagcagcacaccacatcgccgaccgcaaccggccgtaagaaagtcattccttcaacccgcacagtcactacgcgaccgtgggcaatttcttttgccagaatagcgccgccaatatccatttgactcattaaccaaccaccaaagatgtcaccattggcattggtatcggcgggcatggctaaagtacgtaaaacaagatcgccctgagggacgttatgtgttgtagacatggtaaaaccgacttaaaaggaaaatcacaggcgcgatgctactatgattttcctgaggagaacagaggagatacagcgccagccccgaaggactggcagtctggttaggatttatcttcctgcggcatgtggcggtagatatagataccgcttaacaatgtgaagattaaggtaagggcggtcaggccaaagactttaaagttgacccaaatattttgcggcagccagaatgcgatgtagatgtttgccagaccgcaaaggataaagaaaacagcccaggccagattcagcttgctccataccggttgcggcagcgtgagttctttacccagcatccgctgaattagcggctttttcatcacccattggctgactaacagggctcccgcaaatagagcataaatgacagtaaccttccatttaataaactcatcattgtggaagaacagcgtcaagccaccgaagacgaccaccagaacaaaagtgatcagggccatcttctcaaccttacgaaagcgaacccagctatagataagcacaatcgccgtggcgacgatcagcgccgcagtagccgcatagatgtcataaatcttgtaaaacgcgaaaaagacaaccagcggtaaaaaatcaagaaactgcttcattttacgattccgtaatcaaatgcttaaggttattggcgaatcaacatatacaggcggaacagatagatgagcaatatggcactaatcaggttgctcaaggtgttcgccagtacggcaccaatttccggggttaatgcggcaaaagaagaggcaaaaagcagcaacagtgtttttgccagcaaccagctcagtactgcgggtgccaccagacgcatattcgcccaagtcagccgcatactgctacgcatgctggcaaaaacgcccattttgtcctgtaccaacatcaccggtgccagggccagtaaaatggccatgataattcccggaacgaccaccagcatgatgccaatctgtactaaaagggtagtcagaaaaatcagaataaataactttggcaatatcggcgcactggcaccaatagctcgcagcgcactgactctctgacccgcagacaccagctggataattaatattacgcctccggcgagaatggcgttaccgattaatccactaaaagtggacgccgcactagcctgcagcaaaatttgttgctgttccggactcatattctgaaccaggtcgaacaacccactactgccgctaacgggcacgcagtcattgagctgcgcaagctgtgcatcactgggactgaaagcatgccctaacaccactgtgataaacgcacatagcaagcttaccaacagaatggtcataaattgattacggaagaaatttccggtgtcacggtatacggactgcgccgtgatagacatgcactctccttgagttttatgcaggtgttaattagcgggcaattgtaccctggttaagcctcgggtggcagcatcaggtcttgtatggaaaagcatatctttgtaaagcggaggtaattgctggccttcaggcatgggcaaatcgcggcaagtggcgaccgagttaatatttgcgtagcgaaaatatttaaaaattgatttaaatcacattaaccaggattctcaatgcaacttctaaattaatccagatcaataaagggtgaattatcatatgtaatgtgatctatgtaggatcatttgttactccaatgtaggtatattcgtcacgtttttataaccataacgacggagcggatatgaaaaagttaacagtggcggctttggcagtaacaactcttctctctggcagtgcctttgcgcatgaagcaggcgaattttttatgcgtgcaggttctgcaaccgtacgtccaacagaaggtgctggtggtacgttaggaagtctgggtggattcagcgtgaccaataacacgcaactgggccttacgtttacttatatggcgaccgacaacattggtgtggaattactggcagcgacgccgttccgccataaaatcggcacccgggcgaccggcgatattgcaaccgttcatcatctgccaccaacactgatggcgcagtggtattttggtgatgccagcagcaaattccgtccttacgttggggcaggtattaactacaccaccttctttgataatggatttaacgatcatggcaaagaggcagggctttccgatctcagtctgaaagattcctggggagctgccgggcaggtgggggttgattatctgattaaccgtgactggttggttaacatgagtgtgtggtacatggatatcgataccaccgccaattataagctgggcggtgcacagcaacacgatagcgtacgcctcgatccgtgggtgtttatgttcagtgcaggatatcgtttttaattccgcacaaaaacgaccccgtaatatacggggtcaataaggacatggtataaagggtattatttcttcgcttctacgccatcagtttcagagcgaattaaaaatttctcagttgtttgcggaatattctgaatcagccagtcggccatttgcttttcctcatttaaaatcgcttcgatggttggaatactagctgtatcaccggcattttttgctgctgctaatagactggtgtaacaggcgatttcaaattgctcgaagacatatccgctaatagagcctttgactatttcatcagaagggaatataccaccgatactctgcccaagcgcagccattttactcatggaatctttaatgacactacgactaatgtcattacgatcaagaatagtttccagttgaacaatctggtttttggtttcactaagatgttgttcaatacgagcgcgtagttcaggataattatctatacggctggccatggattcaagcatagattcggcttgcttttccattgcgtgggcgtcacgtaaccagtcatgataatgttcaatacgattcatgaaaatgtcctctttataaaatgactaaaagttaaaattcatatttcaggctttattttcggctttcttatttacgttattaatggccagatcagtcagtttgatgtcggtggccttttcttcttccagggtttctttcagaagcttcgctgctttacggtaacctaattgttcagccagcgtcgctaatgtcccgtaactggcaatctcataatgctcgactttctgtgctgcggcaatcagtgcggcatcacgcacttcgtttttctcggtactttcgatgacctcattagcttcttcaataagaccttccattgccacacatttcatgcgcttaattttcaggttgctttcggactccacaacttgatcaatacgttcaatctgtccatgagtttcctcgaggtgcgcatgaaaagcctgacttaatttttcattacttgttgctcttgcgagttttgccagtgcccgggttaattgtttttctgcgctgtaggtatcactaagcaggtgaataaatacatcttcaatggtcttcatattcatatttttctccagtgaaatcactgcgagccatacggcccgcagatgcaattatctttatcagctgatattaataattaacggtgaatcaggatttgccacttttattaccaccgctttgttgaccgccttttttacccgcttcagatgcgcgttgcggatcatttttaaaattaccgccgctatgctgaccgcctttacggcctgcgtcggatgccttctcacggtcttcggcgaaatttccactaccaccacgatgttcggccatgttatttctcccgttgcgttgcattgtttcattaatatgagtgttgtgtgtcgacactcattaaaattagtcgctaatgagaattagtcaaattaagcgcaacgagaagatagagggaaaatatattttgaggaacattctggatatattaacaattacctgaggaataagtgacttagagaaaattattgattttactggtgttatgttgcgggattaatttgtttgattatattactgttgggcggaaaaatgacgtaagttgacgttcgaccggggtaagcgaaacggtaaaaagataaatattaaatgaatttaggatttttccggcttcattaaagaaagttaaaatgccgccagcggaactggcggctgtgggattaactgcgcgtcgccgctttcatcggttgtacaaaaactttcagtgccgccagcattttctctggctcattaatatgttgctcgatgattttaacaatggcgctaccagaaatcgcgcccgcagctcctgcatcaatcgctgcttttacctgatccggggcggaaataccaaatccctgcaatggaggtgcagcgttgtactctttcagcttcgcaaccagatgattgaggggtaacgcggcgcggttttctgcgccggtcacgcctgctcgactcagcaaataggtgtaaccacgaccgtaagaggctatctggcgcagcaggtcgtcatcggcatttggcgggcagatgaagataggtgcgacattatgacgcaacgcggcctggcggaagggcgcggactcttcaactggcacatcggcaaccagcacgctatcgacgccgactttttcgcactgggcataaaactcatcaatgcctttgttaaacaccagattggcatacatcaacaggccaatgggaatggtcgggtgtttctggcgaatcagtgccagcatttcaaaacattgtgccggagtcacacctgccgcaaaggcgcgcagagtggcgttttgaatcgtcgggccatccgccagtgggtcggagaaggggatacctaactccagcgcgtcagcaccggcttcaattagcgtatcgataattttcaaactctgctcaatgcccggatcaccgagcgtgacgaaaggaacgaatgcgccttctttgcgctccttcaactgggcaaacagagattcgtagcgttccatcagatttcccctcgtgctttcaaaatatcgtgaacggtgaagatgtctttatcgccgcgaccggaaaggttaaccaccagtagctgctctttatccgggttttcgcgcatcattttcaacgcatgggccagggcgtgggaggattccagcgccgggatgatcccttcgtgcaggcacagcgttttgaaggcttcaagggcttcatcatcggtaatagacacgtaatcagcgcgtccagtgctgttaagatacgcgtgttgtgggccgacagacgggaaatccagtccggcggagatggagtaagattcttcaatctgcccgtcttcggtttgcatcatcggcgctttcataccgaaatagatacccacgcgaccatgttttagcggtgcgccgtgctcgccagtttcgataccgtgaccacctggctccacaccaatcaggccgacgttggtttcattgatgaaatcagcaaacatgccgatggcattgctaccgccgccaacacaggcgataacggcatccggcaggcgaccttctctttccagaatctgcgctttggtttcttcgccaatcatccgctgaaactcacgcacaatggtcggataaggatgcgggccagctgcggtgcccagcatatagtgcgcggtttcgtaactaccggaccagtcgcgcagcgcctcgttacaggcatctttcagcgtcgcggaaccgctatgcaccgggatcacttccgcacccattaagcgcatacgaaaaacgttagggctctggcgttcaacgtctttggcacccatataaatacggcatttcaggccgagcagggcgctggcaagggcgctcgccacgccatgctgaccggcaccggtttcggcgatgatttcggttttacccatccgcttcgccagcaacgcctgccccagcacctggttagttttatgcgcgccgccgtgcagcaaatcttcacgcttgagatacagcgtggtgttcgtcccggctgtaatgttctggcatttggtcagcgcggttggacgcccggcatagtttttcagcaggtcgttgaactgagcctgaaattcaggatctttttgcgcactgacaaaagcttcttccagctggcgcagagcaggcatcaggatttgtggcacgtacatgccgccaaactcaccaaaataggggttaagtaatgttgtcattgttcctttccttaatatgcgcgcagcgtctggaaaacgctggccaaaagacgtgcgtctttgatgcccggttggctctctacagcagaattaaaatcaagtccggcgcagccggtttgtgccgcttccacgcagttatctgcgcctaagccccccgccagcagaacgttgccaaggctttgaccatttaatagactccagtcaaaacgttgcccgcttccaccctggccgttgtctaaaacatatttatcaacgtgctgaaactcgcgggcgggcagggtttcaccgacgcttaatgctttccagatggcaacatgtgctggcagagcttcacgcagcgtatcgatatacagctgttcttcattaccatgcagttgcactgccgccaggcttaacaccttagctttgtccaccacatcggcaatatcgtgattgcggaacacgccaacatactgcaacggtgccgcagccatcacttcctgcgcctgttcaacgttgacgcaacgcggacttgtcgcaacaaaaatcaacccaccgtaaatcgcgcccgcgtcataagctgctttagcatcttgcccacgcgtcaggccacatactttattctcacccagcaacacccggcgcacggcggcgtgcaaatcgtcatgggccatcaacgcgctaccaatcagaaaaccgttagcgaagtggcttaactcgcgcacctgagcgtaagtattgatgccggattcgctgattaccgtcacgttgtgccccagtttcggcgcaagctcgcgggtacggttgagatcaatgctcaaatcacgcagatcgcggttgttgatgccaacgacctttgctcccaatgcaatggcgcgctcctgttcctcttcattactgacttcggtcagcacccccatctccagactgtgagcgacggcggcaagctggcgatattggtcgtcatccagtacactaagcattaataagcaggcatcggcctggtaatagcgcgccagatagatctggtaagggtcgataatgaagtctttacataaaatcggctgcggggcgatttggctgacgatggggaggaaattaaagctcccctgaaaatatttctcatcagtcagcacgctaattgcgctagcgtaatgtttataaatggcggcaatgcgtgctggatcgaaatcatcacggatcacgcctttactcgggctcgctttcttgcactccagaataaacgccgtgcgcgcaccctgtagcgcatcataaaaatgtcgcgtgctcggctgaacctcattctgaaaactggccagcggttgctgctgtttgcgggcttctacccaaatcgccttgtctgcgacgattttcgctaaaacggtttgcatcatttaccctcgtgccgccagtgcggtgactctgtcgtaagcggaaccactgcgcagtacctcaagaacggtttgcgcattggcttgcagatcttcatggccatgcaggcgcattaacatggcgacgttcgcagcgacggctgcttcatgggcggcgtcgcctttaccttgtaacaaacgtgttaaaatgtcacggttttcttccggtgttccgcctgccagttgctcctggtggtagggtgtcaggccaaagtcttctgcggtgagctgatagcttttaatttcgccgtcatgcagttcggcaacgattgtcggcgcgtgtaaactaacttcatccatcccgccgctgtgcaccaccgccgcgcgttgataccccagcacgcgcaaggtttcggcaatcggcagcaccagttccggactataaacaccaattaacgccagcggcggatgcgccgggttaatcaatggccccagcacattgaacagggtgcgggttttcagttgctggcgaaccggcatcgcgtggcggaatccggtgtgatacttcggcgcaaagaggaaacatacacctaactcatccagcgcctggcggcttttatcggcgttcatatcaagattaataccgaacgccgccagcagatcggagctaccagatttactggagacgctacggttgccgtgtttcgccactttcagcccacaggccgcggcgacaaacgcactggcggtagaaatattgatactgttgctgccgtcaccgccagtaccgacgatatcagcaaacagataatccgggcgcgggaacggcgctgcgttttccagtagcgcggttgctgccccggcgatctcgttcgggtgctcaccgcgaattttcatgctcaccagcgccgccgccagttgttccggcttcagctcgccacgcaccaccgcactaaacagctggtggctttcttgttggctaagcgtctgcgcctgatacagtttttccagaatcggttgcagcgtgttggctggctctagtttctgctgcgcccaggccagcgtttgttccagcaggcgagcgccctgggtggtgagaatggattccggatggaactggaatccacaaacgcgatccgcatcgtgacgtactgccatcaccatgccattaaaatgggcgttgatggttaaaccggccggaatgttactgccaaccaggctgtgataacgcgccaccggcagcgggtttgttaatccggcaaacatcgcctgaccgtcatgttcaatgctggaggctttaccgtggagaatttcgcccgcctgaccgacatagcccccgtaagcttcgacaatcgcctgatgtccgaggcaaatgccaataatgggcagcttgccacgcaagcgggtgaggagttccggcatacaaccggcttcgctcggcacaccggggccaggagaaagcatcagcaccggattgctcatggtcgccaggcgttcaattaaggtttgcgccggaatatggttgcggtaaatcaccacgttatgcccattgctgcgcaactgatctgccaggttgtacgtaaaagagtcgatattatcgagcagcagaatgtcagccatcagaaagtctcctgtgcatgatgcgcggtggcaatagcgcgcagtacagcgcgggctttgttacgggtttcgtcggcttcgctctgcggaacagaatcaaggactacaccagcacccgcttgcacggtggcgataccgttttccaccagcgcgctgcggatcacaatgcaggtgtcgagatcgccatgcgcggtgaaataacctaccgcgccgccgtagctgccgcggcgacgaccttccgcctcggcaattaactgcatagcgcgtactttcggcgcaccgcttaacgtccccatattcatacaggcgcgataagcgtgcagggcgtcaagatcgtgacgcagttcgccgactacgcgagagacgaggtgcatcacataggaataacggtcaactttggtgagatcggcgacgtagcggctgccgggggtgcaaatgcgtgccagatcattacgggcgagatcaaccagcatcagatgttcagacagctctttatgatcggtacgcatttccagttcaatacggctgtcgagatctctgtccagactaccatcggcgcgacgaccgcgtgggcgtgttccggcaatcgggtagatctcaatctggcggctggtggcatcatacttgaggctgctttccgggctcgcgccaaatagggtgaaatcattatcctgcataaaaaacatgtacgggctgggattactctttttcagcacgtaataggccgccagcggactcgggcagggcagagagaaacggcgagatggcaccacctggaaaatttctccagcgcgaatcgctttttgcaacaaacgcactacgccaccgaactcttcatcgctctgattacattcacaacgcatatgcggcacggaaaccactggcagcggcggcgcggcttcggtcagttgctgacgtagttcgttcaggcgagcagtgagacgttgtttttcttcttcattcggagcaaacaggctggcctgaatacgggtgctttttttctgatggtcaatcaccatcagcgtttcagcgagataaaaacagaaatcagggcagttattttccgcactcagttgcggtaaatcttcaaatcccgccacaaggtcataagagaacaggccgccgaagaacatggcttctcgttcttccttcggtacattcaacagattctgcaataaacggaaagcgtcaaaaacgctaagggagcataagcgggcgtcttcatccagcagtggactgacaggggggaagcgcagcacacggcagtttggactttgttcactttccacacccgcaggcagggcgttatccagtagtgccaggagggcttcgccgttgccggaaagtgcctggattgtgacagtgtcacctaaagctgtaatgcgcagcgcactgtctaccagcagcaggctttttaaatcatctttgctgtcgatatctgcggattccagcagcagcgttgccggacgatccccacacaactggtgaaaaagcgcggtgggattgtcgcgataagcgccttcgcaggttagcagttcgagagtcggtttttgtgtttgcattgttattctctaattttgttcaaaaaaaagcccgctcattaggcgggctgggtatctgattgctttacgcatggtgaatacactgcccgtttcaggaagtgcgccaccaacctttcagtacgaaaattgctttcattgtcgataccctttttacgtgaacttgcgtactagttaactagttcgatgattaattgtcaacagctcatttcagaatatttgccagaaccgttatgatgtcggcgcaaaaaacattatccagaacgggagtgcgccttgagcgacacgaattatgcagtgatttacgacctgcacagccataccacagcttccgatggctgcctgacgccagaagcattggtgcaccgtgcagtcgagatgcgcgtcggcaccctggcgatcaccgaccatgacaccacagctgcaatcgcgccagcaagagaggaaattagtcgtagcggactggcgttgaatcttattcccggcgtggaaatttccacggtctgggaaaatcatgaaattcatattgtcgggctgaatattgatattactcatccgctaatgtgtgagttcctcgcgcagcagacagaacggcgcaatcagcgggcgcagctgattgccgaaagacttgaaaaagcgcaaatacctggggcgctggaaggcgcacaacgactggcgcagggcggcgcagtgacgcgcggtcattttgcgcgtttccttgttgagtgcggcaaagccagtagtatggcggatgtctttaaaaagtatctggcgcgcgggaaaaccggatacgttccgccacagtggtgtacaatagaacaagctattgatgtcattcatcattctggcggtaaggcggtgctagctcatcctgggcggtacaatcttagtgctaaatggctgaaaagattggttgcgcattttgccgaacaccacggtgacgcgatggaagtcgcgcagtgccagcaaagccccaatgaacgtacccagctggcggcccttgcgcgtcagcatcatttatgggcaagtcaaggatctgattttcatcagccatgcccgtggatcgaactgggtcgtaaactctggctgcccgcaggcgttgaaggcgtctggcagctatgggaacagccgcagaacaccacagagagggaattatgagccagtttttttatattcatcctgataacccacagcaacgtctgatcaaccaggcggtggagatcgtgcgtaaaggcggggtgattgtttatccaactgattccggctatgcgctcggctgtaaaattgaagataaaaacgcgatggagcgtatttgtcgtattcgccagctgccggacggtcacaactttaccctgatgtgtcgcgatctttctgaactcagcacctatagttttgttgataacgttgcgtttcgtttaatgaaaaacaacacgccgggcaactataccttcatcctgaaggggacgaaggaagtgccacgccgtctgttgcaggaaaaacgcaaaaccatcggtatgcgtgtgccttctaaccctatcgctcaggcgttacttgaagcattgggcgaaccgatgctttccactagcctaatgctgccaggcagcgaatttaccgaaagcgacccggaagaaattaaagatcgtctggaaaaacaggtagatttgattattcacggcggctatctcgggcagaaaccgacaacggttattgatcttaccgatgatacgccggtcgtggtgcgtgaaggcgtaggtgatgtgaagcctttcttataacaaattgcgttccacggatggaagactatggcagggaagtttcgctgcattttgctgttgatagcagggctgtttgtaagttctctaagttatgcagaaaacacggagatcccttcttatgaagaagggatcagcctctttgatgttgaagccactctgcaaccagatggggtgctcgacatcaaagaaaatattcattttcaggcgcgaaatcagcagattaagcacggcttttatcgtgatttaccacgactatggatgcagcctgatggggacgctgcactgctgaactatcatattgttggcgtcacccgtgatggtattcctgaaccctggcatcttgactggcatatcgggttaatgagtattgtcgtgggcgataaacaacgtttcttgcctcaaggcgactatcattatcaaattcattatcaggttaaaaatgctttcctgcgtgagggggattctgatctgctaatctggaacgtgaccggtaaccactggccgtttgaaatttataagacccgtttttctctccagttctctaatattgcgggtaatccatttagcgaaatcgatctttttaccggagaagagggcgacacatatcgtaatggccgcatccttgaggacggaagaattgaatcccgcgatccgttttatcgtgaagatttcacggtcctctaccgctggcctcacgctttacttagcaatgccagcgctccgcaaacgacgaatattttcagccatcttcttttaccctccacgagtagcttgttaatttggtttccgtgtctgttcctggtttgtggatggttatatctctggaagcgcaggccgcaatttacgccggtagatgtgattgaaaccgatgtcattccgccagattacacgcccggcatgttacgtctcgatgcgaagctagtttacgacgataaaggtttttgtgccgatatcgtaaatctgattgtgaaaggaaaaattcatctggaagatcagtctgacaagaaccagcaaatcctgattcgtgttaatgaaggcgcgaccagaaataatgcggtattactgcccgcagagcagttattactggaagcgttatttcgtaaaggcgataaggtcgttcttacggggagacgcaacagagtcttacgcagggcatttttacggatgcagaaattttatctgccgcgtaaaaagtctagcttttaccggtctgatacttttttgcaatggggtggactggcaatattggcggtcattctttacggtaacttgagtcctgtaggctgggcaggaatgagtctggtgggcgatatgtttattatgatctgctggattattccttttttattttgttcccttgagcttttgtttgcccgcgatgatgacaagccttgcgttaatcgtgtaatcatcactttgtttttaccactgatttgtagtggcgtggccttctattctctctacatcaatgtcggagatgtattcttttactggtatatgccagcgggttattttaccgctgtttgcctgaccggttatctcactggcatggggtatatttttctgccaaagtttacccaaactggacagcaacgttatgcccacggtgaagctatcgttaactatcttgcgcgtaaagaggcagcaacacacagtggacgtcggcggaaaggggaaacacggaaactggattacgcgttgctaggttgggctataagcgcaaatttggggagggaatgggcgttacgcattgcccctagcctttctagcgcgattcgcgctccagagattgcccgtaacggcgttttattcagtttacagacgcacctaagttgcggggccaataccagtttgttggggcgaagttattccggtggtggtgctggcggcggcgcgggtggcggaggcggtggtggctggtaattaagctgatgttaatcgaaacaagctttaaccataaagatagtgtagtatgttgcgcctcaaagccaggccgataaacgtcgagtcgtttacttaaggcctgaagagttcaaacagactttactatcagtgagtcagatgtaagttctgactcactgttgcacaaaagcatatcagacgcctgggaaggcgacaccaaaaggaagctctatgagcgaaaagctacagaaagtgctggcgcgtgccggccacggttctcgccgtgaaatcgaatctattattgaagccggtcgtgtgagtgttgatggcaaaattgctaaactcggcgatcgtgttgaagttacccctggattgaaaatccgtatcgatggtcacctgattagcgtacgtgagtccgctgaacaaatttgtcgcgttctggcctattacaaaccggaaggtgagttgtgtacccgtaacgatccggaaggacgtccaacggtgtttgaccgtctgccaaaactgcgtggcgcacgctggattgccgtgggtcgcttggacgttaatacctgtggtctgctgctgttcaccaccgatggtgaactggcaaaccgtttaatgcacccaagccgtgaagttgaacgtgaatatgccgtgcgtgtatttggtcaggttgacgacgcgaaactgcgtgatttgagtcgtggcgtgcagttggaagatggtccggcagcttttaaaaccatcaagttcagcggcggcgaagggatcaaccagtggtacaacgtgactctgaccgaaggccgtaaccgtgaagttcgtcgtctgtgggaagcggttggtgtgcaggtgagccgcctgatccgtgttcgttacggtgatatcccactgccaaaaggtctgccacgcggtggctggacggagctggacctcgcccagactaactatctgcgcgaactggtggagctaccgccagaaaccagctctaaagtcgctgtagaaaaagaccgtcgtcgcatgaaggcgaatcagattcgtcgtgcggtgaaacgtcacagtcaggtgagcggcggtcgtcgttctggcggacgtaataataacggttaatcaaagtatgccggacgtcatatccggcatttttacagattaataatcgatccctatctgcgcttttacaccggcatcaaacgcatgtttgacggggcgtaattcacttaccgtatctgccagttcaagaatatcccgatgacaaccacgacccgtgataatcaccgtctgttgatgtggacgttcatttaacgcctgcaccacttcttccagtggcaaatagtcatacgccaccatatacgtcagttcatcaagcaaaaccatatccagactggaatcagcaagcatccgctttgcatgttgccagacttcgcggcaggcggcggtatcagactcgcggttttgtgtatcccaggtaaagcccgttgccatcacctgaaactcaacgccatgtggctccagcagattgcgttcgccattaggccaggtgcctttaataaactgcacgacgcctactttttttccgtgaccaactgcgcgtgttgccgtaccaaatgccgcggtggttttgccttttccattgccggtaaagacgatgataataccgcgttcatcctgggcctgggccacacgagcatctactttttctttcactcgctgctgacgctgttggtagcgttcatcactcattgggaaattcctggtttacggcccggttgggcgtcaaaggtcatgccggttttacggcggctgtcatcgcccatcagccagaggtagagcggcatgatatcagcgggtgttttaagtttctgtggatcttcggtcgggaaggcgctggcacgcattgcggtgcgcgtaccgcctgggttaatgcagttgacacgcaggcgctgctgatattcatcggccagtacctgcatcatcccttcggtggcaaatttgctcgctgcatatgcaccccagttggctcgtccctgacgtccaacgctactactagtaaagaccagactaccggcgtcgcttttgagtaataaaggaagcagtgcctgggtgagcataaaggtggcattaacgttgacctgcatgacgtcctgccagacctgcggattttgttcgctcattgggcaaacatcgccgagcaatccggcattatgcaaaacaccatccagacgcggataattaacggcaatgcgctgtgccagttgttggcaattttcggacgtgcaggtcagcaaatcgagaataaaccactgtggctgacgcccagtttcttcgtttatgtggctggctacctgacgtaatttttcttcattacggcccaacagaatcactgtcgcaccatagcgtgcatacgtcatcgcggcttcacgaccaataccatcgctggctcccgtcaccaggataatgcgatcattgagtaaatcttgttttggctggtaatgcatggctactcctcaacgacgttgtctgtcgcgctgccagtgtactttatgactttggggctttatgcctgaaacagaagggcatttcaatcagcctggggcgataacaccgcaaaatggatactttgtcatactttcgctgcaataacatctctgcgagacggcttaacatgcctgttgtaaactgtgagccaaagcgttgtttaaccaaggtggggactcgtggaattgttgtctgaatatggtttgtttttggcgaaaatcgttaccgttgtgctagcgattgcggcgattgccgccattattgtcaatgttgctcaacgtaataaacgccagcgtggcgagttacgggtcaacaatctcagcgaacagtataaggagatgaaagaagaactggccgcggcgctgatggacagtcatcagcaaaaacagtggcacaaagcgcagaagaaaaagcataagcaagaagcgaaagcagcaaaagcgaaagccaaactgggcgaggtggcaactgacagtaaaccccgcgtctgggtgctggattttaaaggcagcatggacgcccatgaagtgaacagcctacgtgaagagataacggctgtactcgcagcattcaaaccgcaggatcaggttgtgctccgtctggaaagccctggtggcatggtgcatggttacgggctggcggctagccaactgcagcgtctgcgcgataaaaacattcctttaactgttacggtagacaaagtcgctgccagcggcggttacatgatggcctgtgtggcggacaaaattgtttccgcaccgtttgctattgtgggttccattggcgtggtggcgcaaatgcccaactttaaccgcttcctgaaaagcaaagatattgatatcgaactgcacactgccgggcagtataagcgcacgctgacgttgctgggtgaaaataccgaagaagggcgggagaaattccgcgaagagttgaacgaaacgcatcagttgtttaaagattttgtgaagcgtatgcgtccttctctggatattgaacaggtggcaacgggtgaacactggtacggacaacaggcggtagagaaaggcctggttgatgaaatcaacaccagtgatgaagttattcttagcctgatggaaggccgtgaagtggtcaatgtacgctatatgcagcgtaaacgactcattgaccgattcaccggcagcgcggcagagagcgccgatcgattgttgctacgctggtggcagcggggtcaaaagccattgatgtaaaagacaaacgcgaggctaagacctcgcgttttgctttaatcaaccagatgatatttttcactaagcacatgggccaggtgtttgaacatattaaacaccgcggtgcttttggctgttggcaatccttgttcatctaaaaagtagtcgccggtaaataccagcacgccattacgctgcgtgacgccggtggcttcaatccctgcgagcgtatcctcatgctcacgaatgattttgttggcctctttcaacagcgtttcgcggtcgatgggttgtgtctctttgttcattatttactccttaaacaaggacattagtctacgccaggcatggcttgcagacaaatataccacgctggtggcaagagcgccttactggcaactttggattttgcatgctaataaagttgcgtatcggattttatcaggtacagtgtgacgctttcgtcaatctggcaatagatttgcttgacattcgaccaaaattccgtcgtgctatagcgcctgtaggccaagacctgttaactcagtcacctgaattttcgtgaacagagtcacgacaaggggttgatatccgcagagagcgagtccatatcggtaactcgttgccagtggaaggtttatcaacgtgcgacgcattcctggaagaatcaaattaggtaaggtgaatatgggtaaagctcttgtcatcgttgagtccccggcaaaagccaaaacgatcaacaagtatctgggtagtgactacgtggtgaaatccagcgtcggtcacatccgcgatttgccgaccagtggcagtgctgccaaaaagagtgccgactctacctccaccaagacggctaaaaagcctaaaaaggatgaacgtggcgctctcgtcaaccgtatgggggttgacccgtggcacaattgggaggcgcactatgaagtgttgcctggtaaagagaaggtcgtctctgaactgaaacaactggctgaaaaagccgaccacatctatctcgcaaccgaccttgaccgcgaaggggaagccattgcatggcacctgcgggaagtgattgggggtgatgatgcgcgctatagccgagtggtgtttaacgaaattactaaaaacgcgatccgccaggcatttaacaaaccgggtgagctgaatattgatcgtgttaatgcccagcaggcgcgtcgctttatggaccgcgtggtggggtatatggttagcccgctgctatggaaaaagatcgctcgtggcctgtctgccggtcgtgtgcagagcgtggcggttcgcctggtggtcgagcgtgagcgtgaaattaaagcgttcgtgccggaagagttctgggaagtcgatgccagcacgaccacgccatctggtgaagcgttggcgttacaggtgactcatcagaacgacaaaccgttccgtccggtcaacaaagaacaaactcaggctgcggtaagtctgctggaaaaagcgcgctacagcgtgctggaacgtgaagacaaaccgacaaccagtaaacctggcgctccttttattacctctacgctgcaacaagctgccagcacccgtcttggatttggcgtgaaaaaaaccatgatgatggcgcagcgtttgtatgaagcaggctatatcacttacatgcgtaccgactccactaacctgagtcaggacgcggtaaatatggttcgcggttatatcagcgataattttggtaagaaatatctgccggaaagtccgaatcagtacgccagcaaagaaaacagtcaggaagcgcacgaagcgattcgtccttctgacgtcaatgtgatggcggaaagcctgaaggatatggaagcagatgcgcagaaactgtaccagttaatctggcgtcagttcgttgcctgccagatgaccccagcgaaatatgactccacgacgctgaccgttggtgcgggcgatttccgcctgaaagcacgcggtcgtattttgcgttttgatggctggacaaaagtgatgcctgcgttgcgtaaaggcgatgaagatcgcatcttaccagcagttaataaaggcgatgctctgacgctcgttgaacttacaccagcccagcactttaccaagccgccagcccgtttcagtgaagcaagcctggttgaagagctggaaaaacgcggtatcggtcgtccgtctacctatgcgagcatcattagcaccattcaggatcgtggctacgtgcgagtagaaaatcgtcgtttctatgcggaaaaaatgggcgaaatcgtcaccgatcgccttgaagaaaatttccgcgagttaatgaactacgactttaccgcgcagatggaaaacagcctcgaccaggtggcaaatcacgaagcagagtggaaagctgtactggatcacttcttcagcgatttcacccagcagttagataaagctgaaaaagatccggaagagggtggtatgcgcccgaaccagatggttctgaccagcattgactgcccgacttgtggtcgcaaaatggggattcgcacagcgagcaccggggtattccttggctgttctggctatgcgctgccgccgaaagagcgttgcaaaaccaccattaacctggtgccggaaaacgaagtgctgaacgtgctggaaggcgaagatgctgaaaccaacgcgctgcgcgcaaaacgtcgttgcccgaaatgcggcacggcgatggacagctatctcatcgatccgaaacgtaagttgcatgtctgtggtaataacccaacctgcgacggttacgagatcgaagagggcgaattccgcattaaaggttatgacggcccgatcgttgagtgtgaaaaatgtggctctgaaatgcacctgaaaatggggcgtttcggtaaatacatggcctgcaccaacgaagagtgtaaaaacacacgtaagattttacgtaacggcgaagtggcaccaccgaaagaagatccggtgccattacctgagctgccgtgcgaaaaaagtgatgcttatttcgtgctgcgtgacggtgctgccggtgtgttcctggctgccaacactttcccgaaaagccgtgaaacgcgtgcgccactggtggaagagctttatcgcttccgcgaccgtctgccggaaaaactgcgttatctggccgatgcgccacagcaggatccggaaggtaataagaccatggttcgctttagccgtaaaaccaaacagcaatatgtctctagcgaaaaagacggaaaggcgactggctggagtgcattttatgttgatggcaaatgggttgaaggaaaaaataacctttaattctgtcaggtttttataaacaaagggtcgcgaaagcggcccttttttattgcatattattttttcttcacacctatacactaaggctataaatgatatagtggttatagttagcaccttttttattattaaatcgtattagtcacccgccaggtgtgacgaaaaaacgatgttctgatggcgtctaagtggatggtttaacatgaaattacaacaacttcgctatattgttgaggtggtcaatcataacctgaatgtcagtagtacagcggaaggactttacacaagtcaacccgggatcagtaaacaagtcagaatgctggaagacgagctaggcattcaaattttttcccgaagcggcaagcacctgacgcaggtaacgccagcagggcaagaaataattcgtatcgctcgcgaagtcctgagcaaagtcgatgccataaaaagcgttgccggagagcacacctggccggataaaggtagtctgtatatcgccaccacgcatacccaggcacgctacgcattaccaaacgtcatcaaaggctttattgagcgttatcctcgcgtttctttgcatatgcaccagggcagcccgacacaaattgctgatgccgtctctaaaggcaatgctgatttcgctatcgccacagaagcgctgcatctgtatgaagatttagtgatgttaccgtgctaccactggaatcgggctattgtagtcactccggatcacccgctggcaggcaaaaaagccattaccattgaagaactggcgcaatatccgttggtgacatataccttcggctttaccggacgtagtgaactggatactgcctttaatcgcgcagggttaacgccgcgtatcgttttcacggcaacggatgctgacgtcattaaaacttacgtccggttagggctgggggtaggggtcattgccagcatggcggtggatccggtcgccgatcccgaccttgtgcgtgttgatgctcacgatatcttcagccacagtacaaccaaaattggttttcgccgtagtactttcttgcgcagttatatgtatgatttcattcagcgttttgcaccgcatttaacgcgtgatgtcgttgatgcggctgtcgcattgcgctctaatgaagaaattgaggtcatgtttaaagatataaaactgccggaaaaataatttcttgcgttattttcggcaccttttatgtagcgaaggtgccggaatatattctcttttgttacttatttctataccgtgcacaatatttttatccctcatatttatagggtaaattacctgtaaagtagtgtctaattacccgcctcgcaaactccagttttcaaatatctatttcaggtcaaaagattgaattattcactggagacgattcgtaaattcgctggatttttgactaaagtttctttaggatttgtctcatcgtatgattaattacaccaatcgttcaacgtcttgctgataagtgatggcgattatatgaggttagcaatgccttctggaaatcaggaaccccgccgcgatcctgaattaaaacgtaaagcctggctggcggtttttcttggttctgcacttttctgggtggttgtcgcactgctgatttggaaagtgtggggataactatggtcggtcaggagcaactggagtcgtcaccattatgccagcatagtgacaatgaaacagaaacgaaacgggaatgttccgtcgttattccagacgactggcaactaacatcgcagcagcaagcctttatagaactgtttgctgaagatgatcagccgaaacaataattatcatcattcttattacccatttttaatgaattaaagggcttttaatacaccgcagcaataacagcttgagttatctcaacacaaaataataaccgttaagggtgtagcctatgatcaacacaaatatgaaatattggtcctggatgggcgcgttttctctgtcgatgctcttctgggccgaactcctctggatcattactcactgatccttgaccccgctgcggcggggttgtcatttgctttgccacaaggtttctcctcttttatcaatttgggttgttatcaaatcgttacgcgatgtttgtgttatctttaatattcaccctgaagagaatcagggcttcgcaaccctgtcattaaggaggagctatgagcagtaccctacgagaagccagtaaggacacgttgcaggccaaagataaaacttaccactactacagcctgccgcttgctgctaaaagtctgggcgatatcacccgtctacccaagagtctcaaagttttgctcgaaaacctgctgcgctggcaggatggtaacagcgttaccgaagaggatatccacgcgctggcaggatggctgaaaaatgcccatgctgaccgtgaaattgcctaccgcccggcaagggtgctgatgcaggactttaccggcgtacctgccgttgttgatctggcggcaatgcgcgaagcggttaaacgcctcggcggcgatactgcaaaggttaacccgctcagtccggtcgacctggtcattgaccacagcgtgaccgtcgatcgttttggtgatgatgaggcatttgaagaaaacgtacgcctggaaatggagcgcaaccacgaacgttatgtgttcctgaaatggggaaagcaagcgttcagtcggtttagcgtcgtgccgccaggcacaggcatttgccatcaggttaacctcgaatatctcggcaaagcagtgtggagtgaattgcaggacggtgaatggattgcttatccggatacactcgttggtactgacagccacaccaccatgatcaacggccttggcgtgctggggtggggcgttggtgggatcgaagcagaagccgcaatgttaggccagccggtttccatgcttatcccggatgtagtgggcttcaaacttaccggaaaattacgtgaaggtattaccgccacagacctggttctcactgttacccaaatgctgcgcaaacatggcgtggtggggaaattcgtcgaattttatggtgatggtctggatagtctaccgttggcggatcgcgccaccattgccaatatgagcccagaatatggtgccacctgtggcttcttcccaatcgatgctgtaaccctcgattacatgcgtttaagcgggcgcagcgaagatcaggtcgagttggtcgaaaaatatgccaaagcgcagggcatgtggcgtaacccgggcgatgaaccaatttttaccagtacgttagaactggatatgaatgacgttgaagcgagcctggcagggcctaaacgcccacaggatcgcgttgcactgcccgatgtaccaaaagcatttgccgccagtaacgaactggaagtgaatgccacgcataaagatcgccagccggtcgattatgttatgaacggacatcagtatcagttacctgatggcgctgtggtcattgctgcgataaccagctgcaccaacacctctaacccaagtgtgctgatggccgcaggcttgctggcgaaaaaagccgtaactctgggcctcaagcggcaaccatgggtcaaagcgagcctggcaccgggtagcaaagtcgtttctgattatctggcaaaagcgaaactgacaccgtatctcgacgaactggggtttaaccttgtgggatacggttgtaccacctgtattggtaactctgggccgctgcccgatcctatcgaaacggcaatcaaaaaaagcgatttaaccgtcggtgcggtgctgtccggcaaccgtaactttgaaggccgtatccatccgctggttaaaactaactggctggccagcccgccgctggtggttgcctatgcgctggcgggaaatatgaatatcaacctggcttctgagcctatcggccatgatcgcaaaggcgatccggtttatctgaaagatatctggccaagcgcacaagaaattgcccgtgcggtagaacaagtctccacagaaatgttccgcaaagagtacgcagaagtttttgaaggcacagcagagtggaagggaattaacgtcacacgatccgatacctacggttggcaggaggacagtacctatattcgcttaagccctttctttgatgaaatgcaggcaacaccagcaccagtggaagatattcacggtgcgcggatcctcgcaatgctgggggatagtgtcaccactgaccatatctctccggcgggcagtattaagcccgacagcccagcgggtcgatatctacaaggtcggggtgttgagcgaaaagactttaactcctacggtagccggcgtggtaaccatgaagtgatgatgcgcggcaccttcgccaatattcgcatccgtaatgaaatggtgcctggcgttgaagggggggtgacgcggcatttacctgacagcgacgtagtctctatttatgatgctgcgatgcgctataagcaggagcaaacgccgctggcggtgattgccgggaaagagtatggaagtggctccagtcgtgactgggcggcaaaaggtccgcgtctgcttggtattcgtgtggtgattgccgaaagctttgaacgaattcaccgtagcaatttaattggcatgggcatcctgccgctggaatttccgcaaggcgtaacgcgtaaaacgttagggctaaccggggaagagaagattgatattggcgatctgcaaaacctacaacccggcgcgacggttccggtgacgcttacgcgcgcggatggtagccaggaagtcgtaccctgccgttgtcgtatcgacaccgcgacggagttgacctactaccagaacgacggcattttgcattatgtcattcgtaatatgttgaagtaacaactatttgcttgccggttattttgcttccggcaagcaaatgaattacacaatgcaagagggttatttgttcagcaaatggcccattttctcggctttggtatcgagataatgttcgttattggggttacgacctacaatcaatggtacgcgttcaacaatattaatccctgcttcggtcagaatttcgacttttttcgggttattggttaacaagcggacttcattgacgccaaggagtttgaacatatcagcgcaaagagtgaagtcgcgctcatcagcggcgaagcctaactggtggttagcctctacggtatcgtaaccttgatcctgcagtgcgtaagcgcggattttattcagcagaccaatgttacgaccttcctgacggtgatacagcaaaataccacggccttcctcggcaatttgcgtcaatgccgcttcgagctggaagccacaatcgcagcgcaagctgaacagggcgtcaccggtcagacattcggaatggacgcgcgcaagtaccggggtatgcccggaaatatcgccatagactagcgcgacatgatcgtgtccggttgccagttcttcaaatcccaccatcaggaaatcgccccatggggttggcagtttggcttctgccacacgtttaagctgcatgaaattctccagataatgctggttctgtattggcttattttgccataacgagaaggggttcacctaatcacgacgcgtcgatcgttcacggaatggcacaaatctgtcaatttttcctggaactggcgttttcagttatgattgtgggacttatcaaaaaggagaggccatgcgtagcattgccagacgtaccgcagtgggagctgcactattgcttgtcatgccagtagccgtatggatttctggctggcgttggcaacctggagaacaaagttggctactaaaagcggctttttgggttactgaaactgtcacccagccctggggcgtcattacacatttgattttattcggctggtttctctggtgtctgcgttttcgcattaaggctgcctttgtattatttgccattctggcggccgcaatccttgtgggacaaggcgttaaatcctggatcaaagacaaagtccaggaaccacgaccttttgttatctggctggaaaaaacacatcatattccggttgatgagttctacactttaaagcgagcagaacgcggaaatctagtgaaagaacagttggctgaagagaaaaatatcccacaatatttgcgtagtcactggcagaaagagacggggtttgcctttccttccggtcacacgatgtttgctgccagttgggcactgctggccgttggtttgctgtggccgcgtcggcgaacgttaaccattgctatcttgctggtctgggcaacgggagtcatgggaagccgcctgctgctcgggatgcattggccacgcgatctggtagtagctacgttgattagctgggcgctggtggcggtggcaacgtggcttgcgcaacgaatttgtgggccattaacaccacctgcggaagaaaatcgcgaaatagcgcaacgagaacaagaaagttaacgctggttgattttccgaatttagcccttaaatcatcaacaatgcgtgtggatgccatttcgcagacggcgcgaaaatggtactttaaagggctattgcggtaagttgaccataatttattcgctctaaccacataacgggaagtaatgtgaaatatttactcattttcttactggtgttagcgatcttcgtgattagcgtcacgttgggtgcgcagaacgatcaacaggtgacgtttaattatctgttagcgcaaggggagtaccgtatttccacattgctggcggtattgtttgctgcggggtttgctatcggttggttgatttgtggcctgttctggctgcgagttcgtgtttccctggcgcgcgctgaacgtaaaataaagcgactggaaaaccagcttagtcccgcgactgacgtggctgtagtgccgcacagcagtgcggcgaaggaataactttctatgctggagttgttgtttctgcttttgcctgtagccgctgcctatggctggtatatgggccgcagaagtgcgcaacaaaacaagcaagatgaagccaaccgcttgagccgtgattacgtagcgggggttaacttcctgcttagtaatcaacaggataaagcggtagacctgtttctcgatatgcttaaagaggatacaggcaccgttgaagcccaccttacgctcggaaacctgttccgtagccgtggcgaagttgatcgcgctattcgcatccatcagaccctaatggaaagcgccagcctgacctatgaacagcgtctgttggcgattcaacaactggggcgtgattacatggccgccgggttatatgaccgcgcggaagacatgttcaatcagctgaccgatgaaactgacttccgcattggcgcgctgcaacagttgctacaaatctaccaggctaccagtgagtggcagaaagcaattgatgttgccgaacgcctggtgaagctgggtaaagataaacagcgcgtcgaaattgcccatttctactgtgagttagccctgcagcatatggccagcgacgatctcgatcgtgccatgaccttgctaaaaaaaggggcggcggcagataaaaacagcgcccgcgtatccataatgatgggacgcgtgtttatggcgaaaggagaatacgccaaagccgtcgaaagtctgcaacgcgtgatatcccaggacagagaactggtcagcgaaacgctggaaatgttgcaaacctgctatcagcagttgggtaaaactgccgaatgggcagaattcctgcagcgtgcggtggaagagaacaccggtgccgatgctgaattgatgcttgctgatatcatcgaagcgcgcgacggtagtgaggccgcacaggtctatattacgcgccagcttcagcgtcatccgaccatgcgtgtgttccataagttaatggattaccacttaaatgaagcggaagaagggcgtgccaaagagagcctgatggtgctgcgtgacatggttggcgagaaggtacgtagtaagcctcgttatcgttgccagaaatgtggttttaccgcatacaccctctactggcattgtccgtcttgtcgggcctggagtaccattaaaccgattcgcggtcttgatggcctgtaatttttaaaaaaaatccgactttagttacaacatactaattattaatgttccattgtgctccggcaacgacggcgcagaaaaagcctgccaggggagaaatcgcaactgttaattttttatttccacgggtagaatgctcgccgtttacctgtttcgcgccacttccggtgcccatcatcaagaaggtctggtcatgacgttaactgctagttcttcttcccgcgctgttacgaattctcctgtggttgttgcccttgattatcataatcgtgatgacgcgctggcctttgtcgacaagatcgacccacgcgattgtcgtctgaaggtcggcaaagagatgtttacattgtttgggccacagtttgtgcgcgaacttcaacagcgtggttttgatatctttcttgacctgaaattccacgatatccccaacactgcagcgcacgctgtcgctgctgcagctgacttaggcgtgtggatggtgaatgttcatgcctctggtggggcgcgtatgatgaccgcagcgcgtgaggcactggttccgtttggcaaagatgcaccgcttttgattgctgtgacagtgttgaccagcatggaagccagcgacctggtcgatcttggcatgacactgagtcctgcagattatgcagaacgtctggcggcactgacgcaaaaatgtggccttgatggtgtggtgtgttctgctcaggaagctgtgcgctttaaacaggtattcggtcaggagttcaaactggttacgccgggcattcgtccgcaggggagtgaagctggtgaccagcgccgcattatgacgccagaacaggcgttgagcgctggtgttgattatatggtgattggtcgcccggtaacgcaaagcgtagatccagcgcagacgctgaaagcgatcaacgcctctttacagcggagtgcatgatgagtgattccaacagccgtctggtctacagtacggaaaccggacgtattgatgagtccaaagcggcccctgtacgccctaaaggcgacggtgtggtgcgtattcagcgtcagaccagtggacgtaaaggtaagggcgtttgcctgattaccggtgtcgatctcgatgatgccgaactgacaaaacttgcagcggaactgaagaaaaaatgcggctgcggcggagcagttaaagatggagttattgaaatccagggcgataagcgtgatttattaaaaagtctacttgaagcgaaagggatgaaggtaaaactcgcaggcggttaacataaaaagccacggatatatccgtggctttcgaatattttactgtgcgtattattcagttatttcgtactgaacagaatcaagcgtattataattgcgagtcgataatcgacatttatttacgattatttaccgacctggtgaccaataacacctccgacagctgcaccacctaatgtacccaacgtactgccatcggtcagtactgcaccgcctaatgcccctgcacccgcgccgattgcggtgttgcggtcccgtttagaccagttagaacaggcactcagagacattgccaaagtaattgccagaacagccgcggtcatttttttgctcgttacaaacataatactctctcctgaatttatgattcacggaagtaagctctctataactataatagctaagaataagtctggtgaaattattccgtgaaatctgctcgcgcgcagggttatatcacgcaggtgataatgacttcctgttatatcgctgataataattttatatcttgagagtgttaataacaggtaaatagtcttaattatcaaccaggaatcatcttagagcggatgatttgccaaactgcaaatcatccgtagagaagggaaatggttaaatgtcaacgacgtgaatggtgagtttactgtgctcaagatgcatcagatcgctggcgcgtattttgctatcggtaatcacgcgattgaatcgctcaacgggaccgatggagtaactatgtacagcaccaaatttgctgctgtcagtcaggactatcgcttcgcactctttttccagcacggcattgaccacatcggtacgcatcatatcgcgaccggtaaatccagtttcaggttgccagccatcaataccaataaatgctttgctgaaatgcacctgttggatgcactggcgtgtcaaagggccaaccatactttcgctttttttctgatacacgccaccgagcaaaataacttcacaaggcgcgtctttcagcaaatgcgcgatgtagctgctgaccgtgatgatagtgacatttttcttctgctcgcccagagtccgggcgagtagggcattgctgctgccattttcgataaagatggtttcgcccggttgaaccaggctcgcggcaaactcggcgagttcacgcttcagcgtatagttgctcatcatacgggtttcgacgtcatcactatcaaggctaacagcaaagccatgtgcacggcggaggtaactcagtttttcgagtgtgttgagatcctggcgaatggtaacttcagaaactccagtggcttttgccagatcggttacgctaacctgaccctggtcaatgaccatctgtagaatagtttgttgtcgggaattcatcgctgtaattcttataacgttataatacttaataaaaaaatactgacgcgccgggcatcctcaaataggaaaacctgaaggcacgattgttaaatctcccacggtgccttcgggatgtctggcgtagattcagcaacctggcgcaagagttctgctttaagtatctcgagattatggatcgcagagtggtaatcgcctgccacaaggatatctaacacaatatcaatacgttcggcaacgcgctgggcatcaaattcagacatcaaggacatccttatagcaaaagggggaaaatgaataatgcaaaaattgccgctaaaagagaagtgtttaacagcaacggctaattatcatccaggaatacgatatataatgacgggatatagcgctaagtatatatattcatctacttatgcgcgcttcagatagcgtttataccagcgttcgaaggcgacggcgggcatcggtttggcaaacaaaaatccttgccgctcattgatcccgttcttggttaaaaaagcatcttcctttgcactctctacaccttcggcgatcacctgaagattcaatgcctgggccacagcgacgatcgcccggaccagactctggctgacaggttgtttgtgaatatctcgaacaaaaacctggtcaagtttgatggcatcgatcggaaagcgcgccagttggctaagactagagtagccggtaccaaaatcatccagatgcacttgcgcacctagttggctaaattgttgaataacagacagtgccagttcatcattctcaatcagacaactctctgtcagttcaacatctatagggcagtattcaaaattgagttcctggagaacctgtttcagggcggtgaaaatggtttgatcggcgagctgacgtgcagaaatatttaccgccactcgcaggtttatgcctttatcccgccactttgccacctggcgtacgacatcgagaatcacccaacggcctaaaggcacaattagcccactctcttcggcgtaggaaatgaagtccaacggtggaatcaacccacgttcaggactctgccaacgtactagtgcttccagactgcgcacttcgccacgccaggtgattttcggttgatagtgaataaccaactgatcgttttccagtgctttacgcaagttggtatccagccagagatattcaaatacccgttgattcatttctggggtaaaaacgcaaaattgtcctcgtccgccttccttcgctgtgtacattgctgtgtcggcgtgacgaataatagccgtgctgtcactaccatgttcgggagagagtgcaatacctacactacagctggtataaacttcaattaaaccaatgcgaaaggggagccgtaagcgggtcaaaattcgacttgccattgcttccagcgcgctttgactggtgttggatgccagtaccagaaactcatccccacctggacgagccaacacctggtcatgttcgagacagcttaaaatagccaaactcacgtcgcgtaataactggtcaccaaacaaatgcccataggcgtcgttgacctttttgaaattatccaaatcaagatacacaaccccaactttattgttatctgcatgattaatagcgtgatcgattaaatcctgcattgcgttacgattcggcagtccggtgatactgtcggtatttgccagaatacgcagtcgctcctgagcgcggcgctcttcggtaatgtcggtgccggaacagattaaaaaaatctcgtttttgccactgccgctgtggacaaatttattgcgaaacagaaacagccgctggcctttacatgttggtatccacagttcgacttcatatgcattgccgcttcgaaaaaatacacggttattgcgcctggatgccgcagcttcacgacggctcataaacagtttaaacacgctttgcccaatgacgtcgtgttctttcaaccctgtgtaatcttcacataaccgattgaagcgttggatattcccccggctgtcgagaatcactattgcggaatatgcttcagaaactacctgctcagcaaaggaaagcccgtgacttaaatcacgagcaaccgccggtgtgtcatgccatgcagacgcgttgccagcccattcccgtttattgatttttcgtcctaccagatgcacagaaagatcgctttcatcgacggtcagactcatcatcaggctggaggtgatggccgtcatttccctgatgcgagcagcctgttcggcagataactgcaatgtacgatcaggttctgtggtttcggtggtagaaaagcgcaaaacatcgctgctttccgtcaaccgccagtatggattgtggcttccgagaaagttgtacaacgttgtggactccctaacggttttcatgatgcatatcctccggttaacagcggagtccgcggttaaataaaaggaacaacatgacttacatgaaattaacggcggctaaacgcattgttttttttatatatttatttgtaatccagttttggaaaaacgccagttttcaaacgaaagtcagttaaaaaatctgcctggatataacgaaggtagagcggggaaataaacggcccatccatgaggaatgggccgtgaaaggagattacgcgaccgggcgcgcaataatgctgcgggtttccatgcggacttcggcaatagtgacgtcaataacgtcagtcactttgtaaaccgtttcacctttaatttgtacagtgccgttttcctggctgcaaaccagttcatcgcgcacagcgtgtaagaaaggtgccggaataaaggcgatagcgccgttatcaaccaaacgaacacgcatgccgccacggctgatatcgacaatttccgctgcgaaacgggtgtcggtcccggctttgtctttcaggaagcgtgcgtataaccagtcaccaacatcacgttctgccatccggttgagacggcgacgctcggccatttggacagtgatttcatcctgtgggcgcgtcgcagtttcgcctttgataaccgctttcagcagacggtggttgatcatgtcgccatatttacggatcgggctagtccaggtggcgtatgcttccagaccgaggccaaagtgaggaccgggttcagtgctaatttcagcaaaactctggaagcgacgaatgcggctgtcgaggaaaccagttggttgcgcgtccagttcacgacgcagtttgcagaaaccgtccagcgtgagcacttcttcggcatcgacatgcagaccgtgcgttttcagcaacgctgccagcgcgtcggcattcgccggatcaaagcccatatgcacgttatagatgccaaaaccgagcttatcgcgcagtacgcgggccgcacaaatgttagcggcaatcatcgcttcttcgacgatacggttggcaatgcgacgaggctcggcgacgatatccagcacttcacctttttcaccgagaataaagcggtaatccgggcgatctttaaacaccagtgcgtggttatgacgccactcgccgcggcgttggcaaatttgcgctagcaaacggacttgttcggcaattgcttcactttcaggctgccagtcaccggtattttccagccagtcagaaacctggtcatacaccagctttgctttggattcgatggtggcggcaaagaattcgatattatcttcaatggtgccatcagcggagagcgtcatgcggcatgccagtaccgggcggacttcattggcgcgcagactgcagagatcgtcagaaagctcgcgaggcagcatagggatgttgaagccaggcagatagttggtgaatgcgcgaattttcgcggctttgtccagcttgctgccttcagcaatccacgcggttggatcggcaatcgccacaatcagctgaagtttgtcatccggcaacgccttagcgaaaagggcgtcatccatatcttctgtgctggcactgtcgatggtgacaaaatccagcgcggtcagatcttcacgaaccagaccttcatcgagcatttcggtagcgacgccgtctggtgcttctttttccagattatggcgtgcaagggtaacccaccacggtacaaagtgatcgtcaccaaaagtgatgtattgtgtcagttctgcatagaaagaacgatcgcctttcagcggatgacggcgcatttcggcaaccgcccagtcgccttctttaaactcgtggttcaggccacgggctgcgcggcaaggaatggcgtcttttaagagtggatgatcaggaacgatggccagacggtcatttttgccctgaaccttacccacgaaacgagtcaggaacggttcaaccagttcttctggctctgcggattcacgttctttttcactgtggatcaccgcgataattcggtcgccatgcatgacttttttcatctgcggcggcggaatgaaataacttttttgcgcgtcgacttccaggaagccaaagcctttttctgtggcttttaccaccccttcagcgcgtggcgtctgggaatgcagttgctgtttaagctgcgctagcagcgggttgtcctgaaacataattgtctattttggtggccattagagcggctgacagttttacgcgaatctgtctgacgcggcaaggttaatatgtctcacccaacgcgatttttaagcgatttatccagccacacagcccgctccataccagcagattaataatctgcgtactacttttttcgtgttcgagtaaagggctgaactgggcggcgctaaagcgatcgggtgctcgggtcagccattgtatcgcctgaacggtagcgcgctcaacagaatgacggtcagcccattggttaatttcattttcgcccttgcgcataagggtgctgatttttttatattcattactactatccatacaggtggcaaaacaagcaggactgccatttatacgcgcgcataacaacgccgcaagctgattatccggctgtgtattgccccgtgtgctgtttaacaacttttcgagaagggaaagactaatagggtggagagagagtatttcggccagttggcaaagttctgcagtactactttttgtgtgctcttcaggtagtttttccacctcatagctgcttcgccagcgtaaactttcatcagcaaacagactcgcgtcggcgtagttttgtatctccagcccgggtaaccagcgtaccggatgcccgagataagcctgaaatgtcgcaattgtccgcgcctgaaagccaataaaaccaatgatttggctaatgatcacacagtcccaggcagtaagaccgacgtcattcagatgctggcggcttcggttgtcgataatagaagggctgctagccagttggcgggcatattgcgtgatttgtgccaaccgatgattactttccctggtggaatcaggcccggggagcggcgtaagtcgcgcgctatagtagttacataaccgctggacgccgcaaacctgagcaaccgtcagggccgtgctcaagcgttcataagcggtgaaggtctgactacgggtcacggtaagctggtcagggaacaaatccactgcaagaacacgcgcagggtccagccaactaaggaagggggccagcgtttctttttcaaggatcacgtcgagtagaaagggatcgctgacctttgcggcttccgggaccagaggcagaacgtcatactccgtagtactggattgcgtttcatgataccagtggcttttgccggtgatgtggcgttgttccatgggcgctccttggtcgtaaaggaaatcgttatcctgacgcaaggcgggaaggggagaaagacggatcggcgataacaaatatcagaaaggtataacagagataacgggcggcagaacgccgcccatctttaccaacagaacgattatttcagttcgagttcgttcattgcagcaatgctgaaaccgccgtcaacgtggaccacttcaccggagataccggcagagagatcggagcacaggaatgccgcagagttacccacatcttcaatagtaacggtacggcgaatcggggtaacggcttcgcaatgagccagcattttgcggaagtctttgataccggaggccgccagagtacggatcggaccagcagagatggcgttaacacgcacaccttccggacccatcgcgttcgccatatagcgcacgttcgcttccagagacgcttttgccagacccataacgttgtagttcgggatagcgcgctcagcgccaaggtaggaaagggtcagcagggcagaacccggattcagcatggagcggcaagcttttgccattgcaacgaagctgtaggagctgatgtcgtgggcaattttgaagccttcacgggtaacggcgttaacatagtcaccatccagctgatcgccaggtgcaaaaccaatagagtgtacgaaaccgtcaaatttcggccaaactttccccagttcagcgaacatggtgtcgatgctggcatcttctgcaacatcgcactgcagaacgatgtcagaacccaattgagcggcaaattcttctacgcggcctttcagtttgtcgttctggtaggtgaatgccagttcagctccttcgcggtgcatcgcctgagcgataccgtaggcgatggatagtttgctggcaacaccggttaccagaatgcgcttaccggaaagaaaacccatagctttaatccttattgttgatgcttgttgtgcctgaaaatcaggcgattcgtcgttttagtaaacagtacgaacagataaacggttattataatcaacctggctgtgagtagctatagttgccaggtccgaccggagcaggctgcggcagggggggcgcttttcccctcaccctaaccctctccccagaggggcgaggggaccgtattgtgcaaatattgttaccccagcaacaaacaggctcatacagcccctaaccctttcatggcgatggctgggacggttcagaccttgccgaatattctccagcaccgtctccatgttttcaccacaacagctattcggctcggtctgccccctcgctctttcagggagagggactccggcggttcagttcctgcagaatattctccagcaccgtctcctcattacaatcaatctcgttattccagaaacgcagcacggtccagccctggctctcaagccagctagtgcgcctggaatcataggcaactgctaaatcatgctgcccaccatccagctcaacgactacacgcgcgctgcagcaagcaaaatcgagaatgtagctccccactggatgttgacggcgaaatttgaaatcactaaaacgtcggctgcgaagatatcgccagagctttcgttcctgcaaagtgagattgcgtcttaaatcacgcgcattacttttaattttatctatcacctcattctgacaagatttaatcttttgtcagaatgaggtgaataatctggaaggaggattcagaaaattagcgatctttacgccacgcatccgccgtcaatgcctcgccaaaatgaccggcaatcagccgtttggtgagttcatgcagcgggcttgccagcacatccgcggtgctgcctcgctcgacaacctcgccctgatgcatcaccagcacctggtcgctaatgtgcttcatcattccgatatgctgggtaacataaatatagctaatgccctgtttttcctgtaattccagcatcagattaatcaactggctacgcatgctcatatccagactagcgagggcttcatcggcaataatgacttttgggcgcaatatcagcgcgcgcgccagacccagacgctgtttttgtccgggtgccaacatatgcggatagtaactgacgtgatccggtagcagcccaaccatacgcatcgtttcaataatctgtttgcgacgctgttccggttccaggtcggtgttcaggcgcagtggaaaatccagaatttggctgatacgttgacggggattcaagctggtgctaggatcctgaaaaatcatgcgaatacgctgactgcggaaggaataatcgccaaaatgcagtggatgatcgtcaatcaataactcgccgctggtaggctctatcattcccgccagcatttttgccagcgtggatttaccgctaccattctcgccaataatcgccagtgtctggccttcacgtagcgtaaagctcaagggttttaccgcttctacggtctgacgacgaaaccagccggtccggtagcggaacgttttacttaaattacgcacttcaagcagcgtttcgatcatctcactctttctccatgttcagcgggaaatgacaggcatagagatgatttttcgcccccgtcaaacgtggcgtcacaatgcattctcgttgtgcatacgggcaacgtggccccagacgacaaccaatcggtaactgttccagcagtgggatagcgccgggcagcgtattgaggcgacttttatgcggcatcgcgctgccgaagtctggtatcgcgcggatcagcgcctgggtataaggatgatgtggcatcgtcaccaactccttactcggcgcggtttccactgtttgaccgcagtaaagcacgttaattttatccgcccattggctaagcatttgtaagtcatggctgataagcaaaatagtggtattgctgttttggttgagacgcgtcagcaggcgaaagatttgcgcctgggttgttggctccatactgttggtcggttcgtcagcaatcagcagacgcggttgattcgccagtgcaatggctatcatcactttctgacattcaccttcggtcaactcatagggaaaactgcgcatcgcatctttgtgatctttaatccccacgcggtgcagcagttcaatggcacggcgtttgcgccagccaaaacgctgccaccaacggcctttataggtccaggctgggatgttttgcatcaactggcggcccacacgttcactagggtcaagacagctctgcggttcctggaaaatcatgctcacgttatggccaaccagtttgcgccgttcgcgtgcggagagacgcagcaaatcgatatcatcaaaacgcatacggtcagcagtaacacgccagttatctttattcaccccacaaatcgctttcgcaatcaaactcttgccggaaccggattcaccaacaagaccgcggatttcaccttcggttaaggtcatacttacccggtcgacggctttaacccactcatcaccggttttaaattcaatggtcaggttacgaatatcgagtaatggcattattccacccccgcaataatcgcacgacgaacgccatcgccaaggaggttaaccaacaacacgctaatcataattgccgcacctggcagcatgacagtccacggggcgacataaatcagttccagcgcatcaccgagcatcgctccccattcagggctggggagttgtgcgccgagatcgagaaagcccagcgcggcgatatcgagaattgccatgctcagtgcgcgggtgatctcggtgaccagcccggcggtgatgtttggcatcacagcaaaccagagaatattcagcgtacttgcgccatccagacgggcggcgataacgtactctttttccagttcgtcatgcaccatgctgtaaatgctacgtaccatacgcggcagcaatgccagccagacagcaaacatagcgtgggacaaactcggtccggcaaacgctacaacgataattgccaacagcaggctagggatcgccagtaaggtatccagaatatggttaagcaccgcactgcggaggccgtgtgtcgccccggcgaaggtgcccagtaccaggccacagatcgtcgcggcaagcgtcaccacaaatgcgccacccacggttggcgcagctccgctcagtaaacggcttaaaacatcgcgtccgaggtcgtcagtccccaggaagaaagaaacttcgccatagcggctccaactcggcggcaataattgataaccgagaaattgctggtcgatgccgtaaggcgcaaaccagccgccaaaaatacacagtacagccagccccgcgcagccgtacaggccgaccatcgcagaggcgtcactataaaatttgcgccaggcggtacgcagcgtgcccggcgggcgcttttcgctgtatacgctatcgtaaggcataccattccttatgtttcagattatttatcgtaaggcataccattccttatgtttcagagggttagccatggcacccaaaatatcagaaatcacgttaacaataatgaccagactgccacacaccatcactccggcggaaatggctgcgtaatcctgctggcggatggcgttaattaaccagcgccctaaacccggccagctaaaaaccatttcggtgatcatcgccagcgtcagcatggtggaaaactgtaagcccaggcgaggaataaccggcggtaacgcgttatgcagaacgtggcgacgcaaaatagtaaagcggctcaaaccgcgggtcgccgccgcttttacatagttctggtcatacacttcgatagtgctgatacgcatcaggcggatcacttcagttgttggcgcaacgctcagggtgatcacgggcaatatcatatggcggattgcgctcatgatcatttcatcccgccatggactgtcgctaagccaggcatcaatcaacgcaaaaccggtaatcggtttcacttcgtagagcagatcgaaacgcccactaacgggcaaccaacctagcgtgagactacaaaacagcgtcaacagaagcgccagccagaacaccgggatactaaagcccagtaaggcgatggcgttgatcaagttatcctgccacttatggcgcgtaatcccggcaatcatccccacggggatgccaacaatcagcgcaaaaccgaaggcgaggatgcacagttccatcgtcgccgggaagacctcttttaactgttcggcaatcggttgaccgttaatgctggaaacaccaaaatcccagtggatcaggccgttaaaccagaacacccaggcattccacagactcgcgccttgtaacggcgcatgaggggtgaaatagctcaagctgaagccaacgaaggtcagcaggaacaaggtgacaatcaataacaaaatgcggcgtaaggtgaagataatcatggttttttcacctcatcctgtttctcgcgatacaccccagcaaaggaggcgttaccaaacgggctaagtaccagacctttgatatcgtaccgataggcctgcaaacgcaaactgctcgccagcggcaaaatgggcaattcctgcgccagaatactctgcgcttcgtcataggcttcaatacgcgccgccagctgctggctagagagcgccttacgcaatacgctgtcgaatttcggatcgcaccagtgggcgaggttggtctggctatgaattgccgcgcagctcagtaacggacggaagaaactgtccgggtcgttactgtccgtcgcccaaccggataacgtcagatcatggctcatatccatcaaccgcgcctcctgaaagcgaccttctaccggcacaatcaccacttttacgccaacctgcgccatatccgcctgaatcagttcggcagttttcagtggactggggttccacgcctggctacgtgtgggcacccacagtttcagcgttaaattttccagccccaagctcttcaactgttcgcggcttttcgccggattgtattcagtaattttagcctcgttgtcataggcccagctggcgcgcggtaaaatagaggccgccgtttcagccgtaccataatagatggattgcatcaggcgctggttattaatcgccagtgccagcgcatggcggacagcgggattatttagcggcggtttggcggtgttaaatgccagataggcgacgttcatcccaggacgcagcgttaaacgcaagcgcgggtcgtcacgcaaaatggatagctggctggcagcaggccaggccagaacgtcgcattccccggtcaggagtttgctcagacgtccggtgccgccggagcctaaatccaccactacctgcggcattaacggtttaccgcgccagaagtcatcatgacgttgtaggcgaataaattgcccggcgcggtattcgctcaactgatacggaccggtgccgaccggttgacggtcgagttgctcctggcgatcttctttctctaacttccgggcatattctgcgctcatgacgctagcataatgggttgcgaggtgccacaaaaaagaagcatccggctgggcgagtcggaactcaacggtatgattatccagtttgcggacgcttttcacgttatcggcaaattgcaggctgtcgaagtaggggaagttgctgccgttgacgttatgccacgggttgttgcggtcaaaaattcgctggaaggtaaacaccacatcgtcggcattcattttacgagtgggagtaaaccagtcggttttttgaaacggaacatcgcgacgcaggtggaagcgataggtcgcgccgttgtcgagtacttcccagctttcggcaagttccggcatcaggcgataggtatagggatcgacatccagcagtcgatcataaaactgggcggcaagggtatcgacaattaacccactgctcgctttggatgggttaaaggtgttgacttgcccgctgacgcaatagacaaaaccgctgtcgcggatatcagcatgcgggggagattcaggcgcggcgattgcctgaccactcacaagtccagcaatcaccaaaagagagcttaatacctggcgcataatattaagggattttatgtaaagaggctatcttactaatatttaatgacatttgccattaccgtttgtgttcaggggtcgtaatgagggccgtgtggttggtcgttgaacaggtgacgtcgccatctgttcaacattcgtacccgtgatttctctataactataactcacagaacaacttagcgaggagcagagcggtacgatcgtgagaaacccattaaagcacgctgcagtgcgtgtcattgttagccagatgcggcgtgaacgctttatccggacaacgatactgaccgatcgtctgcaattaaatcattactcattaccccattgattcaaaaactctgcgatctcatcaatgcgtacgggattaatccccgcttcagcagccatttcatgttgggcttcttcgctgatctcttcattgttcatcaaacgggtgagcagtaactggaagtagtgggccagcggtgtgcgttcagcctctgcgacaggctctgcgcattcggtcgcgtactcatcggcaatatcaaaatattttagcgggatatcgtggttcattatttgcccctggggttaatgcgctaagcataagggcggatgatagcactcgtgatccgggtcatacatctttttatagttaatggcgcggcgcgttaccctcaggcaggataatgcgccgcgcatccgactattacgtttcactcaccggcgttctgtcaccatcatacaacggcactttgcgatagcggcggatcagataccataaatatgcgccgcctaagctagcccataccagaccgagtgtcagactcgtactctcgaggttaacccacagcacacccaccgtcagcgcgccaaccagcggcatcagcaaatagtggaagtgatccttccagcttttattcattcctttacgccgccagaaatgattaaacacgctcagattcacgaaggtaaacgccaccagagcaccgaagttaattaacgctgtggcggtaactaaatcgaagaacagcgcgctcaacgcgacaatcccgaccataatgacgttgagtgccggagtccgccattttgggtgcacatagccaaacacgcgctccggaaacacattgtcacgccccatcacatacagcagacggctcacgctggcatgactagccaggccagaggctaacgtgttcacaaacgtggtgcagaggaaaatgctctggaagagcttgccgccgacgtacagcgcaatttcaggcagtgcggcatccggatctttaaagcggctgatatcgggaaagaacagctgcataaagaagctcgccgcgataaagataacgccaccgtagaccgccgtcaggaagatggctttcgggatcacgcgtgcggcgtccggcgtctcttcgctaagcgtggtcaccgcatcgaaaccgaggaaggagaaacagacaatcgtcgccccggtaataatcgggatcaggtgcgcgttctcgctgataaacggctgaagactccagacggtgccaacgccttctcctttatgcagtccctgaactaccaggaagataaacaccaccatgatggagatttgcaccagtacaaacagggtattgaagttagcgaccaggttgacgctcttcagattcgcggcggttaaaatggcgacgaaggttaccacccacacccacggcggcacttccgggaagagggcggagagatagattttcgccaacaagacgttaatcatcggcaaaaagagataatccagcaggctactccagccgaccataaatccgacgtgcgggttaatgctcttttgcgcgtaggtataggcgctaccggcctccggaaactggcgaaccagtttgccgtagctgatagcggtaaacagcacacccgccagcgccagcaaataggacgccggaacgtgaccgtcgctaatgccggagacaataccaaaagtatcaaatacggtcatcggcgtgagataggccagacccatcatcaccacctgccacaatttcagactttttcgcagacgggttttgccgggttgcgcagcaatattcagtggactattaatagccataattgctgcctcccctgcgtaataaggtttgcggtcgtgtcgacctgaaatcaaacctgtttagcaagggaagcaaagggggcggagtccagtcagtagcaggaggggcgcatacgcagcctccctcgccatgcggggatttaatcatcggcatcatctcatttcctcgtcacagtcttaatcgttaacggaagcccgttgccgcccgcgctccataacgcgacatccgggaaatgtctggattaccagcaaatgtcaggcctggctccgctcaggccgatgaaacaaccccgcaaggggtattacgcgtttttcaacatccactcaatttctgtttctgtgatgaggcgctcaaactgcaacagctcatcatttttacaggcgtgatagacatggcagaagcgttcgcctaaatagcggcgcaggtgatcattctcgataaactcacccagggcatcgctctggcgaatcggaaagggtaagccttcctgttccagcccgttgccttcgacttcttcctgcaacggcagctcgttatcaaggccatgcaaaataccggcaaaaatcgctgccatcaccagatatgggttggcatcggcacccgccacgcgatattccacgcggtgattatgacggtcgccgcacggaatacgcagggcgacggtgcggttgttatggccccagctcgcctgcgtcggcacatacattcccggctggaagcggcgatagctgttcacgtttggtgccagcaacgccatgctgctcggcatcaggtcaatcatcccggcgagcatctttttcagcagcgggctatcttcgccttccgcgtcagaaagcacgttctcgccacgattattttgcatactgatatggatatgcattccgctgcccgcgtgctcttcatacggcttcgccataaaagtggcgtgcatcttatgcttttctgccatcagacgcaccaggcgttttagtgccagcgcatcatcgcaggcttccagcacgttatcagtatggtaaaggttgatttcaaactgacccgggctggcctcagcgaccgcgccatctgccggaatcagctgtaactgcgccagttcatcaatatcattgagcacgtcggcgaagtggttgaggttatcaacggagtaaacctggctttgtgtattgcggtcatcggtgccaggcgcgcagggcggttgcagatacccttcagcgtcgcgctggcgatccagtaaatagaactccagctctaccgctacgaccgggaacaatccgcgctggcgcagctgctgccacaggcggttaagaacgttccgcggctcaacgtcaaagggagcgccatcttcatcgaccatggtcaggagcatctgaccgataaactctggatcggcggcagaaggagttaaggaaccgagaacaggaacacaggtacgatccggctcgcccatttcctgacccagacctgcttcttctactacgttgcccagaatatccattgcaaatacgctggccgggaaataacaccctttctcgagcttcttcaggctactaacaggaatacgctttccacggaagcaaccatttaaatcggtaagtaaaacatcaacatattgcgtattcgggtagcgctccaggtagcgtttcacttcctgcgtaaaggcgctaccccgcctctcttcactctgctgaacaaagttctctacttcaacgatattggtttccatgattcttcgcctttggtttgttttccgctcgttatcaaagcgtaaaatataatgaccaccattcgaatctgtatgcaaactaaatgtttgtcaaatgttaaattgagtttgcaaaaatgaaaacccactgctagattgaaaaaatattgaacataaaggtcatttaaagcgcagtaatggcgataatttagtccactttgtgagattgagcatggaaaatataatgaacaatccggttatcggtgtcgtaatgtgcaggaacaggcttaagggtcatgcgacccagactctgcaagaaaagtacctgaatgccatcatccatgcaggcggcttgcctattgcgctaccacatgcgctggcggaaccgagtttacttgaacaacttttgccgaaactcgatggcatttatcttcctggtagtcccagcaatgtgcagccgcacctatatggtgaaaacggcgatgagcctgacgccgatcccgggcgtgatcttctgagcatggcgataattaatgccgcactcgaaaggcgcatccccattttcgccatctgccggggtttacaagaactggtggtggcaaccggtggtagcttgcatcgcaagctgtgcgaacagcctgaattgctggaacatcgggaagatcccgaactgccggtggaacagcaatatgcaccgagccatgaagttcaggttgaagaggggggattactgtctgcgttgttacctgaatgtagcaacttttgggtaaactctctacatggacaaggggcgaaggtcgttagcccacggttgcgtgttgaagctcgcagcccggatggcttagttgaggcggttagcgtcatcaatcatccttttgcgctgggcgtacagtggcacccggaatggaacagtagcgagtacgcgcttagccgtatattgttcgagggctttatcaccgcttgtcagcaccatatcgctgaaaaacagcgactctgaccactacagtttaaggaaatgcaaatatgagtgatgagggactggcgccaggaaaacgcttgagcgaaatccgccagcagcaggggcttagtcaacgtcgtgccgccgaactctccgggctgactcacagtgctatcagtacgatagaacaagataaagtcagccctgccatcagtacgctgcaaaagctgctgaaggtgtatggtctgagtctcagcgaattcttttccgagccggaaaaacctgatgagccgcaggtcgtcattaatcaggacgacttaattgagatgggtagtcagggtgtgagtatgaagctggttcataacggtaacccgaatcgcacgctggcgatgatctttgaaacgtaccagccgggcacaaccactggggaaagaattaagcatcagggtgaggaaataggcactgtactggaaggtgaaattgttctgacgattaatggtcaggattaccacctcgtcgcggggcaaagttatgccattaataccggcatcccgcacagtttcagtaatacgagcgcaggtatttgccgaattatcagcgcccatacgcccaccacgttttaatctttttgttctgtaagccgggtaagcgcaatgcgcccggcaatctatacacaaaatcattcaagttgcatcaaggcggcaagtgagcgaatcccgatgagcttactcaggtaagtgattcgggggagcgaacgcagccaaggcagaggcggcttgaaggatgaagtgtatataaagaatgtcgccagaaataaacgggcatacggcccggggatctctgcgccctgacgttcacaaactgcatatatctgatagacgtgaaacaggagtcataatgaattttcatcatctggcttactggcaggataaagcgttaagtctcgccattgaaaaccgcttatttattaacggtgaatatactgctgcggcggaaaatgaaacctttgaaaccgttgatccggtcacccaggcaccgctggcgaaaattgcccgcggcaagagcgtcgatatcgaccgtgcgatgagcgcagcacgcggcgtatttgaacgcggcgactggagtctctcttctccggctaaacgtaaagcggtactgaataaactcgccgatttaatggaagcccacgccgaagagctggcactgctggaaactctcgacaccggcaaaccgattcgtcacagtctgcgtgatgatattcccggcgcggcgcgcgccattcgctggtacgccgaagcgatcgacaaagtgtatggcgaagtggcgaccaccagtagccatgagctggcgatgatcgtgcgtgaaccggtcggcgtgattgccgccatcgtgccgtggaacttcccgctgttgctgacttgctggaaactcggcccggcgctggcggcgggaaacagcgtgattctaaaaccgtctgaaaaaagtccgctcagtgcgattcgtctcgcggggctggcgaaagaagcaggcttgccggatggtgtgttgaacgtggtgacgggttttggtcatgaagccgggcaggcgctgagccgtcataacgatatcgacgccattgcctttaccggtagtacccgtaccgggaaacagctgctgaaagatgcgggcgacagcaacatgaaacgcgtctggctggaagcgggcggcaaaagcgccaacatcgttttcgctgactgcccggatttgcaacaggcggcaagcgccaccgcagcaggcattttctacaaccagggacaggtgtgcatcgccggaacgcgcctgttgctggaagagagcatcgccgatgaattcttagccctgttaaaacagcaggcgcaaaactggcagccgggccatccacttgatcccgcaaccaccatgggcaccttaatcgactgcgcccacgccgacagcgtccatagctttattcgggaaggcgaaagcaaagggcaactgttgttggatggccgtaacgccgggctggctgccgccatcggcccgaccatctttgtggatgtggacccgaatgcgtccttaagtcgcgaagagattttcggtccggtgctggtggtcacgcgtttcacaagtgaagaacaggcgctacagcttgccaacgacagccagtacggccttggcgcggcggtatggacgcgcgacctctcccgcgcgcaccgcatgagccgacgcctgaaagccggttccgtcttcgtcaataactacaacgacggcgatatgaccgtgccgtttggcggctataagcagagcggcaacggtcgcgacaaatccctgcatgcccttgaaaaattcactgaactgaaaaccatctggataagcctggaggcctgaaatgaccgaacataccagcagttactacgccgccagtgcgaataaatatgcaccattcgacacgctgaatgagagtatcacctgcgacgtttgcgtggttggcggcggctataccgggctctcctccgcgctgcatctggcggaagcgggctttgacgtagtggttctcgaagccagtcgcatcggctttggcgcaagcgggcgcaatggcggacagcttgtgaactcctacagccgcgacatcgacgtgatcgaaaaaagctacggcatggacaccgcccgtatgctcggcagcatgatgttcgaaggtggtgagatcatccgcgaacgtatcaaacgttatcagattgactgcgactaccgccccggcggcctgtttgtggcgatgaatgataaacagctcgccacacttgaagagcagaaagagaactgggaacgctacggcaataaacagctggaattgctggacgccaacgccattcgccgtgaagtagccagcgatcgctataccggtgcgctgctggatcacagcggtgggcatattcatccgctaaaccttgccattggcgaagcggacgccatccgcctcaacggcgggcgcgtgtatgaactttctgccgtgacgcagatccagcacaccacgccagccgttgtgcgaactgccaaaggtcaggtgacggcgaagtatgtgattgtcgccgggaatgcgtatctgggcgataaagtagagccggaactggcgaaacgcagcatgccgtgcggcacgcaggtgatcaccaccgaacggctgagcgaagatttagcccgtagcctgatcccgaaaaactactgtgtggaagactgtaactatctgcttgattactaccgtcttaccgccgacaaccgcctgctgtacggcggcggcgtggtctacggcgcgcgcgacccggatgacgttgagcgccttgtggtgccgaaactgctgaaaaccttcccgcagctgaagggcgtgaaaattgattaccgctggacgggcaacttcctgctgaccctgagccgtatgccgcagtttggtcgcctcgataccaacatctattacatgcagggctacagcggccacggcgtgacctgtactcatctagccggacgtttgattgccgaactgctgcgcggcgacgccgaacgtttcgatgccttcgccaatctgccgcattacccgttccccggcgggcgcacgctgcgtgtgccgtttaccgcgatgggcgcggcgtattacagcctgcgcgatcgtctgggcgtttaattttcgattaaccgtgaagagtcaaaaggtgtgaaacatgagcaacaatgaattccatcagcgtcgtctttctgccactccgcgcggggttggcgtgatgtgtaacttcttcgcccagagcgctgaaaacgccacgctgaaggatgttgagggcaacgagtacatcgatttcgccgcaggcattgcggtgctgaataccggacatcgccaccctgatctggtcgcggcggtggagcagcaactgcaacagtttacccacaccgcgtatcagattgtgccgtatgaaagctacgtcaccctggcggagaaaatcaacgcccttgccccggtgagcgggcaggccaaaaccgcgttcttcaccaccggtgcggaagcggtggaaaacgcggtgaaaattgctcgcgcccataccggacgccctggcgtgattgcgtttagcggcggctttcacggtcgtacgtatatgaccatggcgctgaccggaaaagttgcgccgtacaaaatcggcttcggcccgttccctggtagcgtgtatcacgtaccttatccgagtgatttacacggcattagtacacaggactccctcgacgccatcgaacgcttgtttaaaagtgacatcgaagcgaagcaggtggcggcgattattttcgaaccggtgcagggcgagggcggtttcaacgttgcgccaaaagagctggttgccgctattcgccgcctgtgcgacgagcacggtattgtgatgattgctgatgaagtgcaaagcggctttgcgcgtaccggtaagctgtttgccatggatcattacgccgataagccggatttaatgacgatggcgaaaagcctcgcgggcgggatgccgcttagcggcgtggtcggtaacgcgaatattatggacgcacccgcgccgggcgggcttggcggcacctacgccggtaacccgctggcggtggctgccgcgcacgcggtgctcaacattatcgacaaagaaagtctctgcgaacgcgcgaatcaactgggccagcgtctcaaaaacacgttgattgatgccaaagaaagcgttccggccattgctgcggtacgcggcctggggagcatgattgcggtagagtttaacgatccgcaaacgggcgagccgagtgcggcgattgcacagaaaatccagcaacgcgcgctggcgcaggggctgctcctgctgacctgtggcgcatacggcaacgtgattcgcttcctgtatccgctgaccatcccggatgcgcaattcgatgcggcaatgaaaattttgcaggatgcgctgagcgattaatagcccaacgcaataatgtctgatgcgctgcgcttatcaggcctgcaaacgacgtattgattatgtatgccgaataaagcattcacgccgcatccggcaagttgtattgctcaacttcgttaaatctggtgctttttcaacaacgcgcggaactgatgataagttaaccccagtaattcagccgcgcgcttctggttatatttcccttgttgcaaactgagttgcagcaactctttttcctgctgcatctgaaactcacgtaaatccagcggcagtgttggaaggctggtggtttcactaacggcgatagcgtcttcaggcggacgccgtttaaagggatcaataatgatgtcatcaagcggataatcgctggtgccgtggcgatacacactacgttccaccacgtttttcaattcacgaatatttcccggccaacgataattcagcaatgtttctctggcgcgctccgtaaaccccgggaacagaggcagcttgatttcccgacacatctggatggcaaagtattctgccatcaacattatgtcgctttcgcgctcgcgcagtggtggcagttgtacaacatcaaaagccagtcggtcgagcaggtcagcgcgaaaagtgccttcattgaccatcgccgggagatcggcattcgtcgcgcataccaaccgcacattcacctgcaatggttggctgccgccaacgcgctccagttcaccgtactcaatcacgcgcaataatttctcctgcaccatcatcggtgccgtagcgagttcatcaagaaatagcgtaccgccgtcggcacgttcaaatctccctggatgacgtttttgcgcaccggtaaacgcccccgcttcgtgaccaaacagttcggaatccagcagattttcatttaacgccgcgcagttaagggaaataaacggcccttgccaacgggaggagagataatgcaggcggctggcaatcagctctttaccggtgccgcgttcgccgatgatgagcaccggtttgtccagcggtgcgagatggctaacctgttccagcacttcgagaaagctgttcgcctcaccaagtaaattatctttgtattctgccatgatgaaattcgccacttgttagtgtaattcgctaactcatcctggcatgttgctgttgattcttcaatcagatctttataaatcaaaaagataaaaaattggcacgcaaattgtattaacagttcagcaggacaatcctgaacgcagaaatcaagaggacaacattatgggtattttttctcgctttgccgacatcgtgaatgccaacatcaacgctctgttagagaaagcggaagatccacagaaactggttcgtctgatgatccaggagatggaagatacactggttgaagtacgttctactagcgcgcgcgcgttggcagaaaagaaacagctgactcgccgtattgaacaagcgagcgcgcgtgaggttgaatggcaggaaaaagccgaactggcgctgctgaaagagagagaggatctggcacgtgcagcgttaattgaaaaacagaaactgaccgatctgattaagtccctggaacatgaagtgacgctggtggacgatacgctggcacgcatgaagaaagagattggcgagctggaaaacaaattgagcgaaacacgcgctcgccagcaggcattgatgttacgtcatcaggcggcaaacagcagccgcgatgtgcgtcgtcagctggacagtggcaaactggatgaagcaatggctcgtttcgaatctttcgaacgtcgtattgaccagatggaagcggaagcagaaagccacagcttcggtaaacaaaaaagcctggacgatcagtttgccgaactgaaagccgatgatgcaatcagcgaacaactggcacaattaaaagccaaaatgaagcaagacaatcaataataacatccaggcggcgtccgaacgcgccgccgctcatcgtctaaggagtacttatgagcgcgctatttctggctattccgttaaccatttttgtgctgtttgttttaccgatctggttatggctgcattacagcaatcgttctggtcgcagtgaattgagccaaagtgagcagcagcgattagcgcaactggctgatgaagcaaaacggatgcgcgaacgtattcaggcgctggaatctattcttgatgcagaacatccgaactggagggatcgctaatggcgggcattaatctcaataaaaaattatggcgtattccacagcagggcatggtccgcggcgtctgcgccgggattgccaactattttgatgtaccggtaaaactggtgcgtatcctggtggtgctgagcattttcttcggtctggcgctgtttaccctggttgcttacatcattttgagttttgcgcttgatccaatgccggacaacatggcctttggtgagcagctaccttccagcagcgaattgctggatgaagtcgaccgtgaactggcggcaagtgaaacgcgtttacgcgagatggaacgttatgtcacttccgatactttcacgttacgtagccgtttccgtcaactgtgaggaaagttatgaatactcgctggcaacaggccgggcaaaaggtaaagcctggtttcaaattagcaggcaagctggtacttcttaccgcactgcgctatggcccggcgggtgtggcgggctgggcgataaaaagtgttgctcgccgaccgctgaaaatgttgctggctgtggcgctggaaccgctgttaagtcgggctgctaataaactggcacagcgttataaaaggtgaggggagtttcgcaaaaattgttaaatctcaggcgtataatggatggcaattttcatccatagaaggacgcttacatgtttaaaaaaggcttacttgctctggcactggtgtttagtctgcccgttttcgccgctgaacactggatcgatgttcgtgttccagagcagtatcagcaagagcacgttcagggggccatcaatattcccctgaaggaagtgaaagagcgcattgccaccgccgttccggataaaaacgacaccgtgaaagtgtattgcaatgccggacgccagagtgggcaagcaaaagagatccttagcgagatgggatatacccacgttgagaacgccggtggcctgaaagacatcgcaatgccgaaggtcaaaggttaaaagaattcaccatgagcggcgcttatgcgccgtttttttttctgtcacaccttatttacatccccatagattatttgcgtcagctcacaaatacgctttttccctggtaaaaaatgatttcctgcgtgactaaaacccttgtgctcaattgacagtttattttctgcggagtagtctctcgtttcatgggaccgctaccacggaaaggcaacatgaaacagaaaattacggattacctggacgaaatctacggtggaacatttaccgcaactcatttacagaaacttgtaacgcgtcttgagagtgcgaaacgattaattacacagcgacgtaaaaaacactgggatgaaagtgatgtcgtgttaattacctatgccgatcaatttcacagcaatgatttaaaaccattacccacatttaatcagttttaccatcaatggctgcaaagcatttttagtcatgttcatttgttgccgttttatccatggagttctgatgatggctttagcgtaattgattatcatcaggtcgccagtgaagcgggggagtggcaggatattcagcaactcggtgaatgcagtcatttaatgtttgattttgtctgcaaccatatgagcgcaaaaagtgaatggtttaaaaactatttacaacagcatccaggttttgaagatttttttattgccgttgacccgcaaaccgatctcagcgccgtcactcgcccgcgtgcgttaccgttattaacgccattccagatgcgcgatcatagtacgcgccatttatggaccacctttagtgacgatcaaattgacctgaattaccgtagccctgaagtgttgctggcgatggtggatgttttactctgttaccttgcgaaaggtgctgagtatgtccgcctggatgccgttggctttatgtggaaagagccgggaacaagctgcatccatctggaaaaaacacatctgattatcaaactgttacggagcattattgataacgttgcgccaggtacagtgatcattaccgagaccaatgttccgcataaagacaacattgcttactttggcgcaggcgatgacgaagcacatatggtgtaccagttcagcctgccgccactggtgctgcatgcggtgcaaaaacagaacgttgaggcgctttgtgcgtgggcgcaaaacctgacactaccttccagcaacaccacctggtttaacttcctcgcctctcacgatggcatcgggctaaacccgctacggggcttgttgcctgaaagcgaaatattagagctggtcgaggcgttacagcaggaaggtgcattagtaaactggaaaaataatcccgacggtacacgcagtccgtatgaaataaatgtgacctatatggatgcgttaagccgccgtgagagtagcgatgaagaacgttgcgccaggtttatccttgcccatgcgattttgttaagtttccccggtgtgccagcgatatatattcaaagtattcttggcagccgtaatgattacgcaggtgtcgaaaaactcggatataaccgtgcgattaaccgtaaaaaatatcacagtaaagagataacccgagaactgaacgatgaagctacattaaggcatgcggtatatcatgagttgagccgtttaattacacttcgtcgcagccataacgagtttcatccggataataattttaccattgatacgattaatagttccgtaatgcgtattccaagaagtaacgctgatggtaattgtctgactggattgtttaatgtcagtaaaaatattcagcatgtaaatattactaatctgcatggtcgggatctgattagtgaagttgatatattgggtaatgaaataacgctgcgcccctggcaggttatgtggattaaataaaaaggaacatctcatgattaaaagtaaaatcgtgctgttaagtgcactggttagttgcgccctgattagtggctgtaaagaagaaaataaaacgaatgtatccatcgaatttatgcattctagcgtggagcaggagcgccaggccgttatcagtaaattgattgcccgttttgaaaaagaaaaccctggcatcaccgttaagcaagtgcccgtggaagaagatgcctataacactaaagtcattactcttagtcgtagcggtagcctgccggaagtgatcgaaaccagccatgactacgccaaagtgatggacaaagagcagcttatcgatcgcaaagcggttgccacagtcatcagcaacgttggtgaaggcgcgttttacgatggcgtactgcgtattgtgcgtaccgaagatggtagcgcatggaccggtgttcctgtcagcgcctggattggcggtatctggtatcgcaaagatgtgctggcaaaagcggggcttgaggagccgaaaaactggcaacagctgctggacgttgcacagaaactgaatgacccggcgaataaaaaatacggcattgcgctgcctacagcagaaagcgtgttgacggaacaatccttctcccagtttgcgttatccaaccaggctaacgtctttaacgccgaaggcaaaatcacccttgatacaccagagatgatgcaggcactgacctattaccgcgaccttactgccaacactatgccgggttctaacgacatcatggaagtgaaagacgcctttatgaacggcaccgcgccgatggcgatttactccacctatatccttccggctgtgattaaagaaggcgacccgaaaaacgtcggtttcgtggtgccaaccgagaaaaactctgcggtctacggcatgttgaccagcctgaccattaccgccgggcaaaagaccgaagagacggaagcagcagaaaaatttgtcacctttatggagcaggcagacaacattgccgactgggtgatgatgagcccaggtgctgcgctgccggtgaataaagcggtggtgactaccgccacctggaaagacaacgacgttattaaggcgctgggtgaactaccgaatcagctaatcggtgaactgccaaatattcaggtttttggcgcagtaggggataaaaactttacccgcatgggtgatgtgacgggttctggcgtggtgagtagtatggtgcataacgtcaccgtgggtaaagccgatctctctactacgctgcaagcgagccagaaaaaactggatgaactgatcgaacagcactaaacccaggacaggaatccgcaatgaacaggctttttagtggtcgttccgatatgccctttgcgctgctgcttctcgcgcccagcttattactgctgggcggtctggtggcgtggccgatggtgagcaatatcgaaatcagttttttacgtctgccgctcaatcccaacatcgagagtacgtttgttggggtgagcaactatgtgcgtatcctctccgatcccggcttctggcatagcctgtggatgacggtctggtataccgcgctggtggtggcgggcagcaccgtgctcgggctggcggtggcgatgtttttcaaccgcgagttccgcctgcgcaaaaccgcgcgtagcctggtgatcctctcctacgtaacgccgtccattagcctggtgttcgcctggaaatacatgttcaacaacggctacggcattgttaactacctcggcgtcgatcttctgcatctctatgagcaggcaccgctgtggttcgataatccgggcagtagctttgtgctggtggtgctgttcgccatctggcgctacttcccgtatgcctttatcagctttctggcgattttgcagaccatcgacaaaagcctgtacgaagcggcagagatggatggcgctaatgcctggcaacggtttcgtatcgtcacgctgcccgcaattatgccggtcctggcgacggtggtgacactgcgcaccatctggatgttctacatgttcgcggatgtttatttgctgacgaccaaggtcgatattctcggtgtatatctctacaaaaccgcctttgcctttaatgatttaggaaaagcggcggcgatcagcgtggtgctcttcatcattattttcgctgtcattctgctgaccaggaaacgggtgaacctcaatggcaacaaataaacgcacactcagtcgcatcggtttttactgcgggctggcgctgtttctcatcatcacgctgtttccattttttgtgatgctgatgaccagcttcaagggcgcgaaagaggcgatcagtctgcatcctacgctgctgccgcagcagtggacgctggagcattacgtcgacatttttaacccgatgattttcccgtttgtcgactacttccgtaacagtctggtggtgtctgtggttagttccgtggtggcggtattcctcggcattcttggggcttacgcgctttcccgcctgcgctttaaaggtcggatgaccatcaacgccagcttttacacggtgtatatgttctctggcattttgctggtggtgccgcttttcaaaatcatcaccgcgcttggcatttacgacactgagatggcgctgatcatcaccatggtgacgcaaactctgcccaccgccgtgtttatgctgaaaagctacttcgacaccatccccgatgagatcgaagaagcggcgatgatggatggcctcaaccgtctgcaaattatcttccgcatcaccgtgccgttggcgatgtccgggctgatatccgtgttcgtctactgctttatggtggcgtggaacgactatctgtttgcgagcattttcctctccagcgccagcaatttcaccttaccggtgggcctgaacgcgctgttcagtacgccagattacatctggggacggatgatggcggccagtctggtgaccgcattgccggtggtgattatgtatgcgcttagcgaacgttttattaagagtggtttgaccgccggtggcgtgaagggctaaagcggccagtttctttacaaggagttttaaatgaaaaagttagtagccacagcaccgcgtgttgctgcgctggttgagtatgaagatcgggcgattttagctaatgaagtgaagatccgcgtgcgtttcggcgcaccgaaacacggaacggaagtggtcgacttccgcgccgccagcccgtttattgatgaagactttaacggcgaatggcagatgttcactccgcgtccggcagatgcgccgcgcggcattgagtttggcaaattccagcttggcaacatggtggttggcgacattatcgagtgcggcagcgacgttaccgactacgcggtgggcgacagcgtatgcggctacggcccgctctccgagacggtcatcattaacgcagtgaataactacaagctgcgcaaaatgccgcaaggcagctcctggaaaaacgccgtctgctacgacccggcgcagtttgccatgagcggcgtgcgcgatgccaacgtgcgcgtaggggattttgtggtggtggtagggcttggcgcaatcggtcaaattgccatccaactggctaaacgcgctggcgcttctgtggtgattggcgtcgatcctatcgcccatcgctgtgatattgcccgtcgccacggcgcggatttctgccttaaccccatcggcactgatgtaggtaaagagatcaaaacgctgaccggcaagcagggtgccgatgtgattatcgaaaccagcggctacgccgacgcgctgcaaagcgcgctccgcggtctggcttatggcggcaccatctcctatgtcgcgtttgccaagccgtttgccgaaggttttaacctcggacgcgaagcgcatttcaataacgccaaaattgtcttctctcgcgcgtgcagcgaaccgaacccggattatccgcgctggagccgcaagcgtattgaagaaacctgttgggaactgctgatgaacggttatctcaattgcgaagatttaatcgacccggtggtgacctttgccaatagcccggaaagctatatgcagtatgtcgaccagcatccggaacagagcatcaaaatgggcgttacgttttaattcaaaggaatgaaaaaaatgaaaatcggcacacagaatcaggcgttctttccggaaaacattctggagaaatttcgttatatcaaagagatgggcttcgatggttttgagattgacggcaaactgctggttaacaacatcgaagaagtcaaagcggcgatcaaagaaaccggtttaccggtgaccaccgcctgcggtggctatgacggatggattggcgactttatcgaagagcgtcgtcttaatggcttaaagcagatcgagcgcattctcgaagcgctggcagaagtgggcggtaaaggcatcgtcgttccggctgcgtggggcatgtttaccttccgcttaccgccgatgaccagcccgcgtagcctggacggcgaccgcaaaatggtgagtgattccctgcgcgtactggaacaggtcgccgcgcgtaccggaaccgtggtgtatctcgaaccgttaaaccgctatcaggatcatatgatcaacaccctcgccgatgcccgccgttacatcgtcgaaaacgatcttaaacatgtacagattatcggcgatttctatcacatgaatatcgaagaagataacctggcgcaggcgctgcatgacaaccgcgacctgctcggtcatgtgcatattgcggataaccatcgctaccagccgggcagcggcaccctggatttccacgcgctgtttgaacagctgcgcgcggataactatcagggctatgtagtgtacgaagggcgtatccgggcggaagatcctgcccaggcgtaccgtgatagcttggcctggttgcgtacctgctaagaggtctttgtgaaaagtgcaatgacaagctctccgctgcgggtcgcgataataggcgcaggccaggtggcggataaggttcatgctagctactactgcacccgcaacgatctggaactggtggctgtctgtgacagccgcctttcccaggcgcaggcgctggcagaaaaatacgggaatgcatccgtgtgggacgatccgcaggccatgctgctggcggtgaaacctgatgtggttagcgtctgcagtcctaaccgttttcattacgaacataccctgatggcactggaagcgggctgccatgtgatgtgcgaaaaaccgcccgccatgacgccagaacaggcgcgggaaatgtgcgataccgcgcgcaaactgggcaaggtgctggcctacgactttcaccatcgttttgcgctcgatacgcaacagctgcgtgaacaggtgaccaacggcgttttgggagagatttacgttaccaccgcccgcgccctgcgtcgctgcggcgttcccggctggggtgtctttaccaataaagaactgcagggtggtggcccgctgatcgacatcggcattcatatgctggatgctgcgatgtatgtgctgggctttccggcggtgaaaagcgtgaatgcgcatagctttcaaaagatcggcacgcaaaagagctgtggtcaatttggtgagtgggatccggcaacttacagcgtcgaagatagcctgtttggcaccattgaatttcataacggcggcattctgtggctggaaacgagttttgcactcaacatccgcgaacagagcattatgaacgtcagcttttgtggtgataaagctggtgcgacgctgtttccagcacatatctacaccgataacaacggtgaattaatgacgctgatgcaacgggaaatagcagacgacaaccgccatttgcgcagcatggaagcctttatcaatcacgtacagggcaagcccgtgatgatagccgacgccgagcaggggtacatcatccagcaactggtggcggcgttgtatcaatccgcagaaacagggacgcgtgtggaattatgaccaggccagtaacgttaagtgaaccccatttcagccagcataccctgaacaagtatgcaagcctgatggcgcaggggaacggctatcttgggcttcgcgccagccatgaagaagattacacgcgccagacgcgagggatgtatctggcggggctgtatcatcgggcgggaaaaggtgaaatcaacgaactggtgaacctgcctgatgtcgtggggatggagattgccataaatggtgaggttttcagcttatcccacgaagcctggcagcgtgagcttgactttgccagtggcgaattacgccgcaatgttgtctggcgtaccagcaacggcagtggttacaccatcgccagccgtcgctttgttagcgcagaccaactgccgctcattgcgctggaaatcactattacgccactggacgccgacgcgagtgtgctgattagtacaggcattgacgccacgcaaaccaatcacggtcgccaacatctcgacgaaacccaggtgcgggtgtttggtcagcatctgatgcaggggagctacaccacccaggatggacgcagtgatgtggccatcagctgttgctgtaaggtgagcggtgatgtgcagcaatgctataccgccaaagagcgccgtttactgcaacataccagtgcgcagcttcatgcaggcgagacaatgacgttgcaaaaactggtgtggatcgactggcgggatgacaggcaagctgctttagacgagtggggcagcgcgagccttcgccagcttgaaatgtgcgcgcagcagagttacgaccaacttcttgcagcaagtacagaaaactggcgtcaatggtggcagaaacgtcgtatcacggtaaatggcggcgaagcgcacgatcagcaagcgttagattatgcgctttatcatctgcgcatcatgacgcctgcccacgacgagcgcagcagcattgcggcaaaaggcttaaccggcgaaggctacaaaggccacgttttctgggatacagaagtatttttgttaccgtttcatctgtttagcgatccgacggttgcccgaagtttactgcgttatcgctggcacaacttgccaggcgcgcaggagaaagcgcgacgcaacggctggcagggcgcgctatttccgtgggaaagcgcgcgcagcggcgaagaagagacgccggaatttgccgccattaacattcgcaccgggctgcggcaaaaagtggccagcgcgcaggcggaacatcatctggtggccgatatcgcctgggcggttattcaatactggcagaccacgggggatgaaagtttcattgcgcatgaaggcatggcgctacttctggagacggcaaagttctggattagccgcgcggtgagagttaacgatcgtctggaaattcatgatgttattgggccagacgaatataccgaacatgtcaataataatgcatacaccagctatatggcccgctacaacgttcaacaggcgctgaatattgcccgccagttcggctgtagcgacgatgcgtttatccatcgcgccgaaatgttcctcaaagagctatggatgccagaaattcagcccgacggcgttttgccgcaggatgatagctttatggctaagccggcgattaatctggcgaaatacaaagcggcggcggggaagcaaaccatactgctggattatagtcgcgcagaagtgaacgagatgcagatcctcaaacaagctgatgtggtgatgctcaattacatgctgccggagcagttcagtgcggcaagctgtcttgccaatctgcaattttatgaaccgcgcactattcacgacagcagtttaagtaaagcaatccacggcattgttgccgcacgctgtggcctgctgacccaaagttatcagttctggcgcgaggggactgaaatcgatcttggtgctgatccgcatagttgtgatgatggtatccatgctgccgcaactggcgctatctggctgggggcgattcagggttttgccggggtgagcgtgcgtgacggtgaattgcatctcaatccggcgttacctgagcagtggcaacagttgtctttccctctgttctggcagggctgcgaattacaggtcactcttgacgcgcagcgtattgcgattcgaacttctgcgcccgttagtctgcgtttgaacggtcagcttataaccgtggctgaagaatctgttttctgtttgggtgattttattttgcccttcaatgggaccgctaccaaacatcaggaggatgaatgaaactgcaaggggtaattttcgatctggatggtgtaatcaccgataccgcgcatctgcatttccaggcgtggcagcagattgccgctgaaattggcatcagcattgatgcgcagtttaacgaatccctaaaagggatcagccgcgatgagtctctgcggcgcattctgcaacacggggcaaagagggcgactttaacagccaggagagggcgcaactggcgtatcgcaaaaatctgctctatgtccacagtctacgcgagttgacggtcaacgctgttctacccggcattcgctctttgctggcagatctccgtgcacagcagatcagcgttgggctggcttctgtctccctgaatgcgccgacgattttagcggcgctggagctgcgcgagtttttcaccttctgcgcggatgcttcccaacttaaaaacagcaaaccggacccggaaatctttctcgccgcctgtgcagggctgggcgtgccgccgcaggcatgtatcggcattgaagatgcgcaggcgggcattgacgccattaacgccagcggtatgcgcagcgtggggatcggcgcgggcttaaccggggcgcaattactgttgcctagtacggaaagtctcacctggccgcggttaagcgccttctggcaaaacgtataacaaaggaatcaacatggctcagcttagcttacaacatattcaaaaaatctacgataaccaggtgcatgtggtgaaggacttcaacctggaaattgccgataaagagttcatcgtgtttgtcggcccgagcggctgcggtaagagcaccaccctgcgcatgattgccgggcttgaggagatcagcggcggcgatctgttgatcgacggcaaacgaatgaatgacgttccagccaaagcacgcaatatagcgatggtgttccagaactacgcgttgtatccgcatatgacggtttacgacaacatggcgtttggtctgaagatgcaaaaaatcgccaaagaggtgattgatgagcgggtgaactgggcggcgcaaattctcggcctgcgtgagtacctgaaacgtaagccgggggcgctttccggcgggcaacgtcagcgagtggcgcttgggcgggcgattgtacgcgaagcgggcgtgtttttaatggatgaaccgctctctaaccttgatgccaagctgcgcgtgcaaatgcgcgcagagatcagcaagctgcatcagaaactgaacaccaccatgatctacgtgacccacgatcagaccgaagcgatgaccatggcgacgcggattgtgattatgaaagacgggattgttcagcaagtaggtgcgccgaaaaccgtttataaccaacccgcgaatatgtttgtttccggatttattggaagtccagcgatgaattttattcgcggcacgatcgatggcgataaattcgttacggaaacgcttaaattaaccattcccgaagagaaattagcggttctgaaaacacaggaaagtttgcataagcccatcgtgatgggaatacgaccggaagatattcatccggacgcgcaagaggaaaataacatttccgccaaaattagcgtggcagaattaaccggtgcggaatttatgctctacaccacggttgggggcacgagttaaacggttgggggcacgagttagtggtccgtgctggtgcgttaaatgattatcatgcaggagaaaatatcactattcattttgatatgacgaaatgtcatttctttgatgcagaaacggaaatagcaattcgctaaatacagggggaaggcattcccccaggataatacaaggaacaataatgaaaaagttattaccctgtaccgcactggtgatgtgtgcgggaatggcctgcgcacaggccgaggaaaggaacgactggcactttaatatcggcgcgatgtacgaaatagaaaacgtcgagggttatggcgaagatatggatgggctggcggagcctagtgtctattttaatgccgccaacgggccgtggagaattgctctggcctattatcaggaagggccggtagattatagcgcgggtaaacgtggaacgtggtttgatcgcccggagctggaggtgcattatcagttcctcgaaaacgatgatttcagtttcggcctgaccggcggtttccgtaattatggttatcactacgttgatgaaccgggtaaagacacggcgaatatgcagcgctggaaaatcgcgccagactgggatgtgaaactgactgacgatttacgtttcaacggttggttgagcatgtataaatttgccaacgatctgaacactaccggttacgctgatacccgtgtcgaaacggaaacaggtctgcaatataccttcaacgaaacggttgccttgcgagtgaactattatctcgagcgcggcttcaatatggacgacagtcgcaataacggtgagttttccacgcaagaaattcgcgcctatttgccgctgacgctcggcaaccacagcgtgacgccgtatacgcgcattgggctggatcgctggagtaactgggactggcaggatgatattgaacgtgaaggccatgattttaaccgtgtaggtttattttacggttatgatttccagaacggactttccgttagcctggaatacgcgtttgagtggcaggatcacgacgaaggcgacagtgataaattccattatgcaggtgtcggcgtaaattacagcttctgataatgggctaaattgccggatgcggcgcgagtactttatccgatctataaatgtaggccggataagatgcgctagcatcgcatctggcattcaggcaaggtagctggtatttatttcagcgtcatatgcgtggcaacggtaatattctgtggactcggttttccagaaattaagcggaataataactcgcagctttgttgacctaactcctgcgtcggaacatcgatgccgcccggtgcaggcgttaaaataaaactcagcgtttcattgctataacccaccaccgctaactgctgcggaatagcaatatttttctctgctgccgcacgataaatgctcattaatttcaggctgtcagtggcaaacaccgcctcaggcaacggactctggcttaataattgccgtgctgcttttaatgcagtttcatgggtataaccgccatcaacaatccattcatcacgcactgcaatattatgcgcagccaggctctgcttataaccattaacgcgatcaacgctaacatggacatcaagcggagcatgcaggcaggcaatattttgatgcccactttcaattaatgcatcggtcaacgcaatgctgtcgccaaaattatcggtatcgacagaataaacatgggcatattgaccttcaactttgccaatcaccaccaccggaatatcatatttatcgagttgggcaaaaaaactctcatccgctgggctactgagcataataatgcctttaatcattttctgcttaattttgctttcgcatttttgcagatcttctgccggattgtggctcgtttgtaatatcacgtcgaaaccttcttcttcagctttggcggtgatggcatgcaaaacttcagagaaaaacggattacccgccgtagttttggtgctacgggtagaaatcaccataatggcatcaaaaccgctagaggtcagcgcgcgggccagcttgtttggctgatactgtaattcttcaatggcccgtaacactttttcgcgcgcttccggggagatattagtttgcttattcagcacgcgacttacggtggatttacttacgcctgcaaccctggcaatatcataaatagtaggggacataggtcaggaactccgtccgaacgtgaatgctgcacatcttatggagttcgccggtcgatgacaacacgggcagttgataatcaatggcctggcccccacattcatatccttacgaatgattttttttctggtcttcagagcagcacaggacagcaatgaagcgacttaaaaatgaactcaatgcgctggtgaatcggggtgtcgacagacatctgcgcctcgctgtaaccggacttagccgcagcggcaaaacagcgtttatcaccgcgatggttaatcagttgcttaatattcacgccggagcacgtttgccgctgttaagtgcggtgcgtgaagagcgcctgctgggcgtgaaacgcattccccagcgtgactttggcattccgcgcttcacctatgacgaagggctggcgcagttatatggcgatccacccgcctggccaacgccaacgcgcggcgtcagtgaaatccgcctggcgctacgttttaaaagcaatgatagcctgctacgccactttaaggatacctccacgctgtatctggaaattgtggattatcccggcgaatggttgctcgacctgccgatgctggcgcaggactatttaagctggagccgccagatgacgggcttactcaatggtcagcgcggagaatggagcgcgaaatggcgaatgatgagcgaagggctggacccgctagcgcctgccgacgaaaaccggctggcggacattgccgccgcgtggaccgattatctccaccactgtaaagagcaggggctgcactttattcagcctgggcgctttgtcttgccgggagatatggcaggtgcgcccgcgctgcaattcttcccgtggccggatgtcgatacctggggcgagtccaaactggcgcaggccgataagcataccaatgccggaatgctgcgcgagcgctttaattattactgcgagaaggtggtgaaggggttctataagaatcattttctgcgctttgaccgccagattgtgctggtggattgcctgcaacctctcaacagtgggccacaggcatttaatgatatgcgtctggcactgacgcagctgatgcaaagttttcactacgggcagcgtaccctgttccggcgtttgtttagcccggttatcgataagctattgtttgctgccactaaagcggaccatgtgaccatcgatcagcacgctaatatggttagtttactgcaacaactgattcaggatgcctggcaaaatgcggcgttcgaagggatcagcatggactgcctggggctggcgagtgttcaggcgaccaccagcggcattattgatgttaacggtgagaaaatcccggcgctgcgtggtaatcgacttagcgatggcgcaccgctcactgtttatcctggcgaagttcccgcacgtttgcctggtcaggcgttctgggataagcaaggcttccagtttgaggcatttcgtccgcaggtgatggatgtcgacaaaccactaccgcatattcgtcttgatgctgcgctggaatttttaataggagataaattgcgatgaccgaaccgttaaaaccacgtattgatttcgacggtcctctggaggtcgatcagaatcctaaattcagggcgcagcagacctttgacgaaaatcaggcgcaaaattttgccccggccacgctcgacgaagcgcaggaagaagaggggcaagtcgaagcggtaatggacgcagcgttacgtccgaaacgcagcctgtggcgcaaaatggtgatgggagggctggctctgtttggcgcaagcgttgtcgggcagggtgtacagtggacaatgaatgcctggcaaacccaggactgggtggcgctgggtggatgtgccgctggggcattgattatcggcgctggcgtaggttctgtggtaacagagtggcggcgcttatggcgcttgcgacagcgcgcccatgaacgcgacgaagcgcgtgatttattgcatagccacggcacgggcaaaggccgcgcattttgcgaaaaactggcgcagcaggcgggtattgatcagagccatccggcgctgcaacgctggtatgccagtatccatgaaacgcaaaacgaccgtgaagtggtcagcctgtatgcgcatttggtccagccagttttagatgcccaggcgcggcgcgaaatcagccgtagcgcggcggaaagtacgttgatgattgcggtcagcccgctggcgttggtcgatatggcgtttatcgcctggcgcaatctgcgtttaattaatcgcatcgccacgctgtatggcattgaactggggtattacagccgtttgcgtctgtttaagctggtattgctgaatatcgcttttgccggagccagcgaactggtgcgcgaagtggggatggactggatgagccaagatctcgctgctcgtttgtctacccgcgcagctcaggggattggtgcaggacttctgacggcacgactcgggattaaagctatggagctttgccgcccgctgccgtggattgacgatgacaaacctcgcctcggggatttccgtcgtcagcttatcggtcaggtgaaagaaacgctgcaaaaaggcaaaacgcccagcgaaaaataatgcaatatcgggtgctgaccggatatctttacgccgaagtgcccgtttttccgtctttgtgtcaatgattgttgacagaaaccttcctgctatccaaatagtgtcatatcatcatattaattgttcttttttcaggtgaaggttcccatgcgtctggaagtcttttgtgaagaccgactcggtctgacccgcgaattactcgatctactcgtgctaagaggcattgatttacgcggtattgagattgatcccattgggcgaatctacctcaattttgctgaactggagtttgagagtttcagcagtctgatggccgaaatacgccgtattgcgggtgttaccgatgtgcgtactgtcccgtggatgccttccgaacgtgagcatctggcgttgagcgcgttactggaggcgttgcctgaacctgtgctctctgtcgatatgaaaagcaaagtggatatggcgaacccggcgagctgtcagctttttgggcaaaaattggatcgcctgcgcaaccataccgccgcacaattgattaacggctttaattttttacgttggctggaaagcgaaccgcaagatagccataacgagcatgtcgttattaatgggcagaatttcctgatggagattacgcctgtttatcttcaggatgaaaatgatcaacacgtcctgaccggtgcggtggtgatgttgcgaagtacgattcgtatgggccgccagttgcaaaatgtcgccgcccaggacgtcagcgccttcagtcaaattgtcgccgtcagcccgaaaatgaagcatgttgtcgaacaggcgcagaaactggcgatgctaagcgcgccgctgctgattacgggtgacacaggtacaggtaaagatctctttgcctacgcctgccatcaggcaagccccagagcgggcaaaccttacctggcgctgaactgtgcgtctataccggaagatgcggtcgagagtgaactgtttggtcatgctccggaagggaagaaaggattctttgagcaggcgaacggtggtagcgtgctgttggatgaaataggggaaatgagtccacggatgcaggcgaaattactgcgtttccttaatgatggcactttccgtcgggttggcgaagaccatgaggtgcatgtcgatgtgcgggtgatttgcgctacgcagaagaatctggtcgaactggtgcaaaaaggcatgttccgtgaagatctctattatcgtctgaacgtgttgacgctcaatctgccgccgctacgtgactgtccgcaggacatcatgccgttaactgagctgttcgtcgcccgctttgccgacgagcagggcgtgccgcgtccgaaactggccgctgacctgaatactgtacttacgcgttatgcgtggccgggaaatgtgcggcagttaaagaacgctatctatcgcgcactgacacaactggacggttatgagctgcgtccacaggatattttgttgccggattatgacgccgcaacggtagccgtgggcgaagatgcgatggaaggtagcctggacgaaatcaccagccgttttgaacgcagcgtattaacccagctttatcgcaattatcccagcacgcgcaaactggcaaaacgtctcggcgttagtcataccgcgattgccaataagttgcgggaatatggtctgagtcagaagaagaacgaagagtaagcgcgaatatgcctgatggtgcaacaccatcaggcatattaaattatgctttcagtacagccagagctgcttcgtaatccggctcggtggtgatttcatccaccagctggctgaaaatcacattgtcattttcgtcaataaccacaacggcacgcgctgccagacctttcagtgggccatcagcaattgccacaccgtaagcttgcagaaattcagcgttacggaaagtggagagggtgataacgttgttcagaccttctgcgccgcagaaacgagactgggcgaacggcagatcggcagagatacacagcacaacggtgttgtcgatctcagttgccagttggttaaacttacgtacacttgcggcgcaaacaccggtatcaatactcgggaaaatgttcagcactttgcgtttacccgcaaactgaccgagggtgacgtcagacagatcttttgccacgagagtaaaagtctgcgctttgctacccgcctgcgggatggaattggcgactgtaaccgggttgccctggaaatgaacggtttgactcatgattatctttcctgtttacatatagttaacgtcacacctagtttatgctaactgtcaataacacagcaaacgctattacagggtctccttacaacaactgtcaacgcagtttgtaattaaaagattaacccatatctggtgaatgaaacagtgatgaaccttctgccagatcaataaatcagaaaaatttaatgatatgacagaaggatagtgagttatgcggaaaaatcaggcaacgttacgcgtatgaccggcaagctgggccagcgcatcgttattttcgatggtgatgtatttacctttgactgccagcatgccgcttttctggaagcgacccagcagacggctgatggtttctaccgtcaggcccagatagttaccgatatcgccacgagtcatcgtcaggcggaattcacgaggggagaagccgcgttgggcaaaacgacgggacaggttgtagatgaatgcagccagacgttcctcggcatttttcttgctcaacagcaggatcatgtcctgatcgcctttgatttcaccgctcatcagacgcatcatctgctgacgcagattcggcattttaccggacaaatcgtccagcgtttcgaacgggatttcacataccatgctggtttccagcgcctgcgcgaagctcgggtgatggccgctgccgatggcgtcaaatcccaccaggtcgcctgctaaatggaaaccagtgatttgctcgtcgccttgctcagtgatggtataacttttaatcgtaccggagcggatggcataaaggcttttaagttcatcaccagccttaaacagcgtctggcctttctgaataggcttcttccgctcaatgatattatcaagctgatcaagctcatgttcgttgagtgtgaacgggatgcaaagctggctgatgctgcaatcctggcaatggatagcacaaccgccagactgaatgcgccgtataattcgcttttccgggatcataggtctgctcaagccgtaattgatatttgtcaattttaacatctttttagggagcaagtaagtctaagcaaaccttaacagcagagaattccgatattagatgtaaatatatgtctatctatttgaaaacccttaagttgttaagggtaactttacataaaagtgtgaacaagctggcacaaattgtttaatgtttacagcaaaagataaccttcatggcgcaataaccactcttttcgctgaactccgcctgcatatccggtcatggtgccgtttcggccaataacccgatggcaaggtacgacgatgctgatgggattgcttccgtttgccgcaccaacggcacgcgccgcgccaggacggcccaattgctcagccagttggccgtaatgcattacctgcccgcaggggatagtgcgtagtgttttccagacttcgcgctgaaatggcgtcccccccgtagcagtgggaagcgtatcaataatgctaagattaccggcaaaatattcacgaagcttgtcgcttaaaccgcctggattggtggcagaaatgcgctcatagccttctttgcgataatggatgtccagcagctgcaccatgcgttcgctgtactcttcccattcaaccgcccgcaggcgaaattgctcatcgcaaatcacccacagtggacccagtggcgtggcaattttttcttcaagtaatctcagcatccgttctctcttaagacaaacgtgggtaaatacccggacctatcggcagaccgacaagataccacgccagcacatcgcagccatactatgcagaaacaatgctgtcgatggctgcttttgcgtcagactgtgctttcgctgccatttccggaccgtatgcgatcccttcggcgaagacaaatttcacatcggtaatgccgataaagccgaggaacgtggacagatacggcgtcaccaggtccgttggtccatctttgtggatcccgccgcggctggtaataacgatggcttttttacccgttaccagaccttccggaccgttctcggtatagcggaaagtaacgcctgcgcgggcaaccaggtcaaaatagtttttcaactgagtcgagatgttgaagttatacatcggtgccgcaataacgataacgtcgtgggctttcagctcggcaatcaactcatcggaaagtgccagagcttcctgctgacgcggagtcagcggcgcatcgctcggacgcagagcgccaaccagttcgccatccagtaccggaatcggatttgcagccaggtcgcgaacggtgatttcatcagcggagtgcttttcgcgccattgttcaacaaaataatcggacaactgattagactgagagtaccctgccaggatgctggatttaagaactaataccttgctcatggtgtttccttatagatgtttgaatgggcgatgccccgttgcttgttgacactttattcacaatcctgccacagagatagcgcaataaatcgaagcctatgttcgaatttattgaacaacgcatagaaagccgcgatgtggtactctatatctatcatttaaaagaaaattaatcaggcagactactgcccactaacgttatgacagaacaacaaaaattgacctttacggccttgcagcagcggctggattcgctgatgctgcgtgacagactgcgtttttctcgccgtctgcacggcgtgaagaaggttaaaaatcctgatgcacaacaggccattttccaggagatggcgaaagagattgaccaggcggcagggaaagtcctgctgcgtgaagcggcacgaccggaaattacttatcctgacaatttaccggttagtcagaaaaaacaggacattctcgaagcgattcgtgatcaccaggtggtgatcgtcgccggggaaacgggttctggtaaaacgactcagttaccgaaaatctgtatggagctggggcgcgggattaaaggactgatcggccatacccagccgcgtcgtctggcggcaagaacagtggcgagccgtattgcggaagagctgaaaacggagccgggcggttgcatcggttacaaagtgcgtttcagcgatcacgtaagtgataacacgatggtcaagctgatgaccgacggtatcctgctggcggagatccagcaagaccgcctgctgatgcagtacgacactatcattattgacgaagcgcacgaacgcagcctgaatatcgattttttgctcggctatttgaaagagttgctgccgcggcgtcctgacctaaaaatcattatcacttccgcgactatcgacccggaacgctttagccgccactttaataatgcgccgattattgaagtctccggtcggacctatccggtggaagtgcgctatcgcccgattgttgaagaagccgatgacaccgagcgcgatcagttgcaggcgatttttgacgccgtagacgaactgagtcaggaaagccatggcgacattctgatctttatgagcggcgagcgggaaatccgcgataccgccgatgcgctgaacaagctgaacttacgccataccgaaatcttgccgctttatgcgcggcttagcaacagcgaacaaaatagggtattccagagccacagcggacggcgcattgtgctggcgaccaacgtcgcggaaacgagcctgaccgtaccggggattaaatacgttatcgaccccggtacagcgcgtatcagccgctacagctatcgcaccaaagtgcagcgtttgccgattgagccgatttcccaggcgtctgccaatcagcgtaaaggccgctgtggtcgtgtgtccgaagggatctgtattcgtctctattccgaagacgatttcctcagccgcccggagtttaccgatccggagattctgcgtaccaacctggccagcgttattttgcagatgaccgcgctggggctgggcgatatcgctgcgttcccgtttgtcgaagcaccggataaacgcaatatccaggatggcgtgcgtctgctcgaagagctgggcgcgatcaccactgatgaacaggccagcgcctataaactgacgccgctcggtcgccagctcagccagttgcctgtcgacccacgtctggcgcgtatggtgctggaagcgcaaaaacatggctgcgtgcgtgaggcgatgattatcacgtccgcgctctccattcaggatccgcgcgaacgtccgatggacaaacagcaggcaagcgacgaaaaacatcgtcgcttccacgacaaagagtctgactttctcgcgtttgtgaatctgtggaattatcttggcgagcagcaaaaggcgctttcttccaacgccttccgtcgcctgtgtcgtaccgattatctcaactatctgcgcgtgcgcgaatggcaggatatctacacccagttgcgtcaggtggtgaaagaacttggcattccggttaacagcgaaccggcggagtatcgcgaaattcacattgcgttgctgaccggtttactttcccatatcggcatgaaagatgccgataaacaagaatataccggcgcacgtaacgcgcgtttctccatcttccccggttctggtttattcaaaaaaccgcctaaatgggtaatggtggcggaactggtagaaaccagccgcctgtgggggcgcattgctgcgcgtatcgacccggaatgggtggagccagttgctcagcatttgattaaacgcacctacagcgaaccgcactgggaacgggcgcagggcgcggtgatggcaacggaaaaagtcactgtttatggtttgccgattgttgccgcgcgcaaggtcaactacagccagatcgatccggcgttatgtcgtgaactctttattcgccacgcgctggtggaaggtgactggcagacgcgtcacgcattcttccgtgaaaacctgaaactacgggcggaagtagaagagctggaacacaaaagtcgtcgccgcgatattctggttgatgacgaaacgttgtttgagttctacgaccagcgcatcagccacgatgtaatctccgctcgccacttcgacagctggtggaaaaaagtcagccgcgaaacgcctgatttgctcaactttgaaaaaagcatgttgatcaaagagggcgcagaaaaaatcagcaagctggattacccgaacttctggcatcagggcaatctcaagctgcgtttgagctatcagtttgagcccggcgcggatgctgacggtgtgaccgtacatattccgctgccgttacttaaccaggttgaggaaagcgggtttgaatggcagatccccggtctgcgccgcgaactggtgattgctctgattaaaagcttgccgaaaccggtacgccgtaattttgtacccgcgccaaactatgccgaagcgtttttaggccgcgtcaaaccgctggagttaccgttgctcgacagccttgagcgcgagttacggcggatgaccggcgttaccgttgaccgcgaagactggcactgggatcaggtgcccgatcacctgaaaattaccttccgcgtggtggatgacaaaaacaagaagctaaaagaagggcgcagcctacaagatctgaaagatgcgctgaaaggcaaagtgcaggaaacgctatctgcggtggcggatgacggtatcgagcagagcggcttacatatctggagttttggtcagctgccggaaagctacgaacagaagcgtggcaactacaaagtgaaggcgtggccggcgctggtggatgagcgcgacagtgtggcgatcaaactgtttgataacccgctggagcaaaagcaggcaatgtggaacggtcttcgccgtctactgctgctgaatattccaagcccaatcaaatatttacatgaaaagttaccgaacaaagccaagctgggactgtactttaacccgtatggcaaagtgctggagctgatcgacgactgtatctcctgcggtgtggataaattgatcgacgccaatggtggcccggtctggacggaagaaggctttgctgcgctgcatgaaaaagtgcgtgccgaactgaacgacacggtggtggatattgcgaagcaggtcgagcaaatccttacggcagtgttcaatatcaacaaacgtctgaaagggcgggtggatatgaccatggcgctggggctttctgacattaaagcgcagatgggcgggttggtatatcgcggttttgtcactggtaacggcttcaaacggctgggcgacacgctgcgatatttgcaggcgattgaaaaacggctggaaaaactggcggttgatccacatcgcgaccgtgcgcagatgctgaaagtcgaaaacgtccagcaggcgtggcagcaatggatcaacaaactgccgcccgcacgtcgtgaggatgaagacgtgaaagagatccgttggatgatagaagagttgcgcgttagttacttcgctcaacaacttggtacgccttatccgattagtgataagcgtattttgcaggcgatggagcagattagcggttaaccctgctatttgcctgataaagaaaaaacccggtaagcatttagcgccgggttttttattaattctaaaacggtaagggtaaaaattcaggaattcagaaaaatacaattctctgctgcaagatgaataatgtttatctacagcatttccttaaaagatatgtcaggcttgcggagtggcggttaaggacatacgatttcctcctttcagagtgctccgcttctcactattatctcacgcagtattcttaagggaacgataaggaggaaccatgaacattaccccgtttccgacgcttagcccggcaactatagatgccataaatgttatcggacagtggctggcgcaggatgatttctccggtgaggtgccgtatcaggccgattgcgtgatccttgcaggcaatgcggttatgccgactatcgatgcggcatgtaagattgcccgcgatcagcaaattcctttactgattagtggtggtatcggtcacagcacaacttttttgtatagcgccatcgcacagcatccgcactacaacactatccgcaccactggcagagcagaagcgaccatcctggcggatatcgctcatcagttctggcacattccgcatgaaaaaatctggattgaagaccagagtacaaactgcggtgaaaacgcacgctttagcatcgcgctattgaatcaggccgtagaacgagttcatacggctatcgttgttcaggaccccaccatgcagcggcgcacgatggcgacgttccgccgtatgactggggacaatcccgatgcaccacgctggttaagttatcccggattcgttcctcagttaggaaataacgcagacagtgtaatctttattaatcagttacaaggattatggccagttgagcgttatctcagtctactcactggcgagctgccgcgtttacgcgatgatagcgatggctacggtccccgcgggcgagattttatcgttcacgttgattttccggcagaagtcatccatgcatggcaaacgctgaaacatgatgcggtgctcatcgaggcgatggaaagtcgcagcttacgttaaaaattgcccgtttgtgaaccacttgtttgcaaacgggcatgactcctgacttttatttctgccttttattccttttacacttgtttttatgaagcccttcacagaattgtcctttcacgattccgtctctctgatgattgatgttaattaacaatgtattcaccgaaaacaaacatataaatcacaggagtcgcccatgagtgtacccgttcaacatcctatgtatatcgatggacagtttgttacctggcgtggagacgcatggattgatgtggtaaaccctgctacagaggctgtcatttcccgcatacccgatggtcaggccgaggatgcccgtaaggcaatcgatgcagcagaacgtgcacaaccagaatgggaagcgttgcctgctattgaacgcgccagttggttgcgcaaaatctccgccgggatccgcgaacgcgccagtgaaatcagtgcgctgattgttgaagaagggggcaagatccagcagctggctgaagtcgaagtggcttttactgccgactatatcgattacatggcggagtgggcacggcgttacgagggcgagattattcaaagcgatcgtccaggagaaaatattcttttgtttaaacgtgcgcttggtgtgactaccggcattctgccgtggaacttcccgttcttcctcattgcccgcaaaatggctcccgctcttttgaccggtaataccatcgtcattaaacctagtgaatttacgccaaacaatgcgattgcattcgccaaaatcgtcgatgaaataggccttccgcgcggcgtgtttaaccttgtactggggcgtggtgaaaccgttgggcaagaactggcgggtaacccaaaggtcgcaatggtcagtatgacaggcagcgtctctgcaggtgagaagatcatggcgactgcggcgaaaaacatcaccaaagtgtgtctggaattggggggtaaagcaccagctatcgtaatggacgatgccgatcttgaactggcagtcaaagccatcgttgatagtcgcgtcattaatagtgggcaagtgtgtaactgtgcagaacgtgtttatgtacagaaaggcatttatgatcagttcgtcaatcggctgggtgaagcgatgcaggcggttcaatttggtaaccccgctgaacgcaacgacattgcgatggggccgttgattaacgccgcggcgctggaaagggtcgagcaaaaagtggcgcgcgcagtagaagaaggggcgagagtggcgttcggtggcaaagcggtagaggggaaaggatattattatccgccgacattgctgctggatgttcgccaggaaatgagcattatgcatgaggaaacctttggcccggtgctgccagttgtcgcatttgacacgctggaagatgctatcagtatggctaatgacagtgattacggcctgaccagtagtatctatacccaaaatctgaacgtcgcgatgaaagccattaaagggctgaagtttggtgaaacttacatcaaccgtgaaaacttcgaagctatgcaaggcttccacgccggatggcgtaaatccggtattggcggcgcagatggtaaacatggcttgcatgaatatctgcagacccaggtggtttatttacagtcttaatgagtgaaagaggcggaggttttttcctccgcctgtgcgcgtcagagtttagcgaatttttcgagggtgcgaataagctgtgtgacgaagccatattcgttatcgtaccaggcgaccgttttcaccagttgtaaatcgcccacggcggtaatttccgtttgcgtggcatcaaacaccgaaccgaaatggctgccaatgatatcggaagagactatttcttcatcggtataaccaaatgactcgttattggtggttgcttgtttaagtgcgttattcacctcttcggcagtcacttttttccgagaatcgataccagttcagtgaccgaacctgttttcaccggcacgcgttgcgcatgacctttcagtttgccgctcagttccgggatcaccagaccaatggcttttgccgcccccgtagtgtggggaatgatattttctgccgctgcgcgtgaagcacgtaaatctttaccacgcgggccatccaccagtgactgggtgccagtataggcatgaatggtcgtcatcgtgccgacttctatcccgaaactgtcatgcaaggctttggccatcggcgcaagacagttagtggtgcatgacgccacggaaacaatggtgtcgttgccatccagagtgtcgtcattgacgttataaacgatagttttcatttcaccggcaggggcggaaatcaacaccttcttcgcaccagcatcaagatgcgcctgcgatttctcggcggaggtataaaagccagtacattcgacaatgatttctgcacctttcgctttccacggaatatttttagcctctttttcggcgtaaaccgcgatacttttcccatcaacgataagtgaatcttccgtaaaatcaacgctccaggggaatggtccgtagtttgaatcatgtttcagcaggtaggcgagaatttatggggaagtgagatcattaatagcgacaacgtctatgttgcttttgacttcaagtaatcgacccaacaccagtcgaccgatacgaccaaaaccgttaataccaactttactcatggttttctcctgtcaggaacgttcggatgaaaattgatcctttccaagcttagaccaggatggcgggatgggcaatctccattctcacagtgaaacgtaacgtactgaaaacgggtgaacaatatttaatgaaattttgagaaaagcccgttatgttaacggaaaattatgttaaagcaggaaatgttatggaaaataaatatagtaggttacaaatcagcattcactggctggtctttttactggttatcgcagcgtattgcgcaatggagtttcgtggtttcttcccacgtagcgatcggccactcatcaacatgattcatgtttcctgtggcatcagtattctcgtgctgatggtcgttcgtcttttgttaaggctgaaatacccaaccccgccgattatacctaagccaaaaccgatgatgacgggactggcgcatttgggacatttggtgatttatctcctgtttattgcgctgccagtgattggtttggtgatgatgtataaccggggcaacccgtggtttgcgtttggtttgacgatgccttacgctagtgaggccaatttcgaacgggtagatagcttaaagagctggcatgaaacgctggcgaatctgggatattttgttatcgggttgcacgctgcggctgcactggcacaccactatttctggaaggacaacacacttctacgcatgatgccgcgtaaacgttcctgaaggatatttaaagaaaacgcctgtactaaaaccgacccgtggtacaggcgaagaatacgggtctacatcggaagcgcctattatatttatttgtatgataaataaaaccataatccttgcccatacgtccatctggcttatttttaatcaattcacccgatctttgatctcatcaacggtatcaaaataaaccagcgtataacgttcaaatcgaacataagattcgataaaccatggaggttatatgaaaaaactggcacttattttgtttatgggaacgcttgtttccttttatgccgatgccgggcgcaaaccctgttctggtagcaaaggggggatcagtcactgtacggcaggcggcaaatttgtctgtaatgatggttctattagtgcaagcaaaaaaacatgcactaactgaagtgtaaaaggggtgccatgagaaaatgaatctgctagtcaaatgcgcggggaaaatccccgcgcttgcccttacctggacgtgcaggccatgagcgcagcaacctccttatcaccgtcccggaaccgcagttcgtagagcgtttgtcgggtcaggagtgtgaatgtcagaatcgtaatgcagataatgagcagacacaccaccagagggttgtgcttcatagcctttctccttgccggatggcgggtaagaggctaagatctgaattgctaggttcattcgttggcctcggttgatagaaatatcggtcggggccttcgtctttctgattcccggttagcctgaaaacagaaagtctcaggcacccgcaggcatcctatgaggtttccttagggacgaaaataatcacttcacgaaattgcgtgctgttttccagaatttttcgtcattcgggttagccagtttagccattcgttactctcttcattccaatagcattaattttctatgcaataattgttgtaaaaatgtgacgcaaagaggtttttggtcataagtaattaccgtcaagtgccgatgactttctatcaggagtaaacctggacgagagacaacggtaatgaatacaactcccagtcagcgattaggttttttgcatcacatcaggttggttccgttatttgcctgcattctaggcggtatcttagttctattcgcattaagtagtgccctggctggctatttcctctggcaggccgatcgcgatcagcgtgatgttactgcggagattgagattcggaccgggttagcgaacagtagtgattttttgcgtagtgcccggatcaatatgattcaggccggggctgcgagtcgtattgcggaaatggaagcaatgaagcgaaatattgcgcaagccgaaagcgagattaaacagagccagcaaggttatcgtgcttatcagaatcgaccggtgaaaacacctgctgatgaagccctcgacactgaattaaatcaacgctttcaggcttatatcacgggtatgcaacctatgttgaaatatgccaaaaatggcatgtttgaagcgattatcaatcatgaaagtgagcagatccgaccgctggataatgcttataccgatattttgaacaaagccgttaagatacgtagcaccagagccaaccaactggcggaactggcccatcagcgcacccgcctgggtgggatgttcatgattggcgcgtttgtgcttgccctggtcatgacgctgataacatttatggtgctacgtcggatcgtcattcgtccactgcaacatgccgcacaacggattgaaaaaatcgccagtggcgatctgacgatgaatgatgaaccggcgggtcgtaatgaaatcggtcgcttaagtcgtcatttacagcaaatgcagcatagtctggggatgacagtagggactgttcgacagggcgcggaagagatttatcgtggcaccagcgaaattagtgctggcaatgcggacctgagttctcgcaccgaagaacaagcggcggctatcgaacaaactgccgccagcatggagcaactcactgcgacggtgaaacagaatgcggataacgcgcatcatgccagcaaactggcgcaagaggcttctattaaagccagcgatggcgggcagacggtttccggtgtagtaaaaacgatgggcgctatctccacgagtagcaagaaaatttctgagatcaccgccgtcatcaacagtattgctttccagacgaatattctggcactgaatgctgccgttgaagccgcgcgagcgggtgagcaagggcgtggatttgccgttgtcgccagcgaagtacggacactcgcaagtcgcagcgctcaggcggcgaaagagattgaaggcttgatcagtgaaagtgtcaggttaattgacctggggagcgatgaggtggcaacggccgggaaaaccatgagcactattgttgatgccgtcgcgagtgtcacacatatcatgcaggaaatcgccgccgccagcgatgaacaaagtagaggcataacgcaggttagccaggcgatttctgaaatggataaggtgacgcaacagaatgcttctctggtagaagaggccagtgcggcggcggtgtcccttgaagaacaggcggcacgattaactgaggcggtggatgtattccgtctgcacaaacattctgtgagcgcagaacctcgcggagcgggtgaaccagttagtttcgctacggtgtgaaaatgttcaaggagggatcgacagatcccttcacctttcagaacggcatactttttcgaatagcgttaatcatcaactggcaaccagaagagaacgtcgcatctacgcgggtcagtattccaatcggttcgcctgcaccatgtcccggaacaggcagggccaccagcgtggcatgacgcaggtcgtcttttacagcgccagaagggacaaaccacacgtaatcgtattcaaccgtaagttgacgagataggctagcagacagcgtttcgatacaaccgctaggaattttacagccctggctctgcactaatgcatcactatgctggcgtggcgcagtgccttctggacttacaacgaccggccattccagcacccggcttagcgttacgttctcctgaagtagcgggtgattagggcggacaaccagcttcaagctttcaagaaacagcagttcgtaattaagcccggtcatcagttcaggatcactcatccgaccaatgccgatatcgatttccccggtttttaaacccgccagaatcatagggttactcattgtcgcaacttgcaaggtcgtctctttttgttgctgatgaaactgacctataacgctaggtaatatccccagtgccgcagtaggtagtgcaccaaccctgacgacatcattattaagaccttctttacgatgaaggctccgtccggcagtgttgatggcgtcaagaactctgactgcatgcgttaaaaattgttcgccgggtaaggtaagttgcgccccctgacgaccacgctcaaacaagcgagcgccagtcagctgctccagttcattcaatgtcttagagagcgcaggttgactcaaattaagggtttcagccgcgcgccccaaagttccttgttgtgcgacagctacgaatgtatgaaggtggcgcaaacggatgcgctgactaaacagactatttttttccataagcgatgttaaaaacgaagcggtgtcgctgacaagtgaagttgtttgattatgataacttgattgcaaaatattattaacaattaaagcaattatgttacagcaaaatggataatattgatgttttcgcggcgagatcacagtttgtaaattcttcccgcaagagtgaatgcggttacctacactccagattactgaccactggaggcagacactatggcgaacagcatcacggcggatgagattcgggaacagtttagccaggcaatgagtgccatgtaccagcaagaagttccgcaatatggcacgctgctggaactggtagctgatgtgaatctggctgtgctggaaaacaatcctcaactgcacgaaaaaatggtaaatgcagacgagctggcgcgactgaatgttgaacgtcatggggcgattcgcgttgggactgcacaagagcttgctactcttcggcggatgtttgccattatggggatgtacccggtgagctattacgatctcagccaggcaggggtgccggtacatagcacagcatttcggcccattgatgatgcttctctggcgcgtaatcccttccgcgtttttacctccttactccgccttgagcttatcgagaacgaaattttgcgccagaaagcggcggagattctgcgtcagcgcgatatcttcaccccacgttgtcgacaactgttagaggaatatgagcagcagggcggctttaacgaaacacaggcacaggagtttgtgcaggaagccctggaaacgtttcgctggcaccagagtgcaacggtagatgaagaaacctatcgcgcattgcacaacgaacatcggttgattgctgatgtggtctgttttcctggatgccatatcaaccacctgacgccacgtacgctggatattgaccgggtgcagagcatgatgcctgaatgcggaattgaacccaaaattctcatcgaggggccgccgcgccgcgaggtaccgattttactacgccagaccagctttaaagcactggaagagacggtgttgtttgcggggcagaaacagggcacgcataccgcgcgctttggtgaaattgagcagcgtggcgtggcattaacgccgaaagggcgacaactgtatgatgatcttctgcgtaacgctggaaccgggcaggataatctcactcaccaaatgcatttacaggaaaccttccgcacttttcctgacagtgagtttttaatgcgtcagcaagggttggcatggttccggtaccgtctgacgcctagcggtgaggcgcatcgtcaggcgattcatcctggagacgatccacagcccttaattgaacgtggttgggtagtggcgcaacccatcacctatgaagatttcttgcccgttagcgcggcggggatcttccagagtaatctgggtaatgaaacgcagacacgcagtcacggtaatgccagtcgcgaagcatttgagcaggcgttgggttgtccggttttggatgagttccagctttaccaggaagcggaagaacgcagtaaacgtcgctgtggtttgctttaaaatctgaccatccgcctttgcaaaaatttgcctgattttacaaacgaatcaggctcatcccatcgacataaaaaaaatgccgatttatgcatattctctcagttcaacaattggattattaataaatattgtctagagtgagcggtcataaataagcactttcttgccgctgaaaacgaccagcgcgggaccattcacaacaccagaaggactcactttcaggtatggatcgtagacgatttattaaaggttcaatggctatggccgccgtgtgcggtaccagcggcattgcttctcttttttctcaggcggcattcgcggcagattctgatattgccgacgggcaaacccagcgttttgacttctccattctacagagtatggcgcacgacttagcgcaaacagcgtggcgtggtgcgcctcgtccgttacctgacacgctggcgacaatgacgccgcaggcttataacagtattcaatacgacgccgaaaaaagcctctggcataacgttgagaaccgtcaactggacgctcagttcttccatatgggaatgggattccgtcgccgcgttcgtatgttttctgtagatccagcaacacatctggcgcgtgaaattcactttcgcccggagttgttcaaatacaacgatgcaggtgttgatacaaaacaattagaagggcaaagcgatctcggctttgccggttttcgcgtgtttaaagcccccgaactggcgcgccgtgatgtagtaagttttctcggcgcgagttatttccgcgccgttgatgatacatatcaatacggtttgagcgcccgcggcctggcgatcgacacttacaccgacagtaaagaagagttccccgactttaccgccttctggtttgatacggtaaaaccgggggcaactacctttaccgtttatgcgttgctcgatagcgccagcattactggtgcctataagttcactatccattgtgagaaaagtcaggtgattatggatgtggaaaatcacctgtatgcgcgcaaagacattaaacagctgggcattgcgccgatgaccagtatgttcagctgcggtactaatgaacgtcggatgtgcgatacaattcatccgcaaattcatgactctgatcgtctgtccatgtggcggggcaacggcgagtggatttgccgtccgctgaataatccgcaaaaattgcagttcaatgcttacaccgacaacaacccgaaagggtttggtttattgcaactggatcgtgacttctcccattatcaggacattatgggctggtataacaaacgcccaagtctgtgggtggaaccgcgtaacaagtggggtaagggcaccatcggcctgatggaaatcccaacaacgggcgaaacgctggataacattgtctgcttctggcagccagaaaaagctgtaaaagcaggtgatgagtttgcattccagtatcgtctgtactggagtgcgcaaccgcctgttcattgcccattagcgcgcgttatggcgacgcgtaccggcatgggcggtttcagcgaaggttgggcgccaggtgaacactatcccgaaaaatgggcgcgtcgttttgccgtcgatttcgttggtggtgatctgaaagctgccgcgccaaaaggcattgagccggtgattacgctttccagtggggaagcgaagcaaatcgaaattctctatattgaacccatcgatggttatcgtattcagtttgactggtatccgactagcgactccactgatccggtcgatatgcggatgtatctacgttgtcagggggacgctatcagtgaaacatggctgtatcagtatttcccgccagcgccggataaacgtcagtatgttgacgaccgcgtgatgagttaatcgttttttcttcggcaccttcttcgggaggtgccgtctggttaaacacgatcccgctcgcatttttccctaagttaaatgagtaatctgatggtgtgtatttcagatacaccttgtcagccactaacagggagtgcgtatgtttccagaataccgagatttaatatcccgtctgaaaaacgaaaatcctcgctttatgtccttgttcgataaacacaataaacttgatcatgaaattgccagaaaggaaggttccgacggtcgagggtacaatgcggaagtggtccgcatgaaaaaacaaaagctacagttaaaagatgagatgctcaaaatcctgcagcaggagagcgtcaaagaggtgtaaactttcctaagccgccagccaggcggcttttttaacaactgcatggattgactggagataagatgactgaaacgataaaagtaagcgaaagtcttgaattacatgctgttgcagaaaatcacgtcaaacctctttatcagttaatctgtaaaaataaaacctggttacagcagagcctaaactggccgcagtttgttcaaagtgaagaggacacgcgaaaaacggtgcagggtaatgtgatgttgcatcaacgcggctatgccaaaatgttcatgattttcaaagaagatgaacttatcggcgttatcagctttaatcgtattgaaccactgaataaaaccgctgaaatgggctactggctggacgaatctcatcaggggcaggggatcatttctcaggcgctgcaggcattgattcatcattacgcccagtctggtgaacttagacgcttcgtgatcaaatgtcgggtggacaatccgcaaagcaaccaggtcgctttgcgcaatggttttatccttgaaggttgcctgaaacaggctgagttcctgaatgatgcctatgatgatgtgaacttatacgcgcgtattatcgatagtcaataatcacaataaccctgccagcggcgttcgcgtaatgcgctcctcgccgttaatgacttttggaccacggacatgaaccgtgtcgccatcaaaggcttcaacgacggcgtggtcggttaactccacatggttttcaattatcaccgcacctgtaatacggctctcaccttgtatgacaacgtgctcgtcgagcagaatcggtccgccacgtaccacggcatttccgccaaccaagacatgatgttttaacacacaattaccttccacaatggcatattccgccacctggctactgtaatgaatcgtcggaatggcatcttcttctatgccagctttcacctgcgcgtgaccgtagactttagcgcaatcgcatagccagacattgttctcttcattaccttcaatactggcaaaatcaaaaacttcggcgcgatgttcaataaaagcataccggacgacggcatcgccataaatttgtgcctggtggacaatacggctggcgctaacccttgcgcgatcataaatttggagcaggagttgatggtcgggcgttaagccttgtgcggcgacgatcatagaatgttgatcaattaaggcgtgaccaaatattctacattgcccgtaaactaaactgtcatgaatggtgacgctgtcacttatatatgcaccctggctgatttcactattatcgatccagacgttatccgttgcgtaaacctctccccacagcacgctggtgccggtgatacgcgtattaccggaaatcaccgctccgccgaacgcaatagcattctggtcgtaaatccagcaatttccttcttgtgctaacaccgtttcgcgatcgatccagccgccagcggttcctgctatcacatcgttaaaatcgctaatggcgataatctgccgtaataacacattttttttagtgccatcttcctgataactaaaggctcgctgttcttcacttagacgatatttgcgcatagcgttttcccacaggtgacttactataaccgtagcaaattctgcggctctggctatgctcgagaaaattccataaaatgcatttcaaatatactttataaattaaacaaaatgagtaagaagatgcagagcgataaagtgctcaatttgccggcaggctactttggtattgtgttggggacgatagggatgggatttgcctggcgctatgccagccaggtttggcaggtcagtcactggttaggggatgggctggtgattctggcgatgatcatctggggattattgactagcgcatttattgcccgactcatacgctttccgcatagcgtgctggcggaagttcgccatccagtgctgagcagttttgtgagtttgtttccggcaacgacgatgctggtggcgattggttttgttccgtggtttcgcccactggcggtgtgcctgttcagttttggtgtcgtggttcagttggcttatgccgcctggcaaactgcgggattatggcgcggatctcaccctgaagaagctaccacgcctggactgtatctgccgacagttgccaacaactttatcagcgcaatggcctgtggtgcgttgggctacaccgacgccggtctggtgtttttaggcgcaggcgttttcagttggctaagccttgaaccggtgatcttgcagcgtctgcgcagtagcggagaattacccacggcactgcggacaagtctcggcattcagctcgctcctgcgctggtggcttgtagtgcctggctgagcgtcaacggcggcgagggtgacacgctggcgaaaatgcttttcggttatggactgctgcaactgctgtttatgctacgtctgatgccatggtatctctcccagccatttaatgctagtttctggagtttcagcttcggcgtatctgcactggcaaccaccggtttgcatctggggagtggcagcgataatggatttttccatacgctggcggtgccgctgtttatctttaccaattttattattgcaatactgctcatccgtacttttgcgcttctgatgcagggaaaattgttagtcagaaccgagcgcgccgttttaatgaaagcagaggacaaagaatgatcattcgtgacgaaaactattttactgataaatatgaattaacccgcacacactctgaagtactggaagcggtgaaagtggttaaaccgggtaaaacgctggatctgggctgtggcaatggtcgtaacagtctttacctggcagccaatggttatgatgttgacgcatgggataaaaatgccatgagtatcgccaacgtcgagcgcattaaatccattgaaaatctggataatttacacacccgagtcgttgatctgaataacctcacatttgatagacagtacgattttattcttagcactgtggtgctgatgttccttgaggctaaaaccatccccgggttgattgccaatatgcaacgttgcactaaacctggtggttacaacctgattgtggcggcgatggataccgctgattatccatgtaccgtcggcttcccgtttgccttcaaagagggagaattacgtcgatattacgaaggctgggagagggtgaaatacaatgaagacgtcggcgagctgcaccgcaccgacgccaacggtaatcgtattaaactgcgtttcgccacgatgctggcacgtaaaaaatgacccggtaagcacaaaacgcgtgaaaattccccacgctgagatgatttactgttcttcttttcggtaagcatattttttatcgaagggatgtgaaattaatcacagtagtcgaagtttttagcagcttaacttactgaaatttaagtactgatgattgacttagcccctttttcggcattgactatgtcgtctgaaaaggggctgaaaaatttattttcaccaacactttttttgccacaacacgaagcggcgctttttgctataacttagaaagtaatataatcatctcaggaaactattcatgcgtaccacaagttttgcgaaagttgcagctttatgcggcttattggctctgtctggttgtgcatctaaaatcacccagccagataaatattctggttttttaaacaattactctgatttaaaagaaacaaccagcgctacaggtaaacctgttttacgttgggtagacccgagttttgatcaaagcaaatatgacagcatcgtctggaacccaatcacttattatccggtaccgaaaccgagcacccaggtagggcagaaagttctggataaaattttgaactataccaacaccgaaatgaaagaagcgatagcgcagcgtaaaccactggttaccaccgctgggccgcgtagtctgattttccgtggggccattaccggtgtagataccagcaaagaagggctgcaattctatgaagtggttcctgttgcattagtggttgcggggacgcaaatggctacaggccaccgtaccatggatactcgcctctattttgaaggtgagctgattgatgcagcgactaataaaccggttatcaaagtcgttcgtcagggcgaaggtaaagacctgaataacgaaagtacgccaatggctttcgaaaatattaaacaagttattgatgacatggcgaccgatgccaccatgtttgacgttaacaaaaagtaattccagacgcgccatcgttagatggcgctttttatccggtgcgccgtaaaaccccatccttcagggcggggatataaggcgcggttttccacctgaccaggtgtttgctgttgttcaatgtattggcggatgacggatattggcgcacctccgcagctactggcaaaatagccaggactccacaaaacgcctttgtagtaatacctgaatgcaatatctggtcgatctcgtcgcagtcacctacccgatacgcctttgaggctgtttaccagactggatatcgccagtttgggaggatagttaattaacaaatggacgtgatctggttcgccatccatttcaaccagttcagcttcaaaatcagcacatacatttgaaaagtaagtgcgtagtttttctgtcgcgtcatggtcaaaaatctggcgtcggtatctggtgacaaagagcaggtgaacatgcatcaggaaaacacaatgccttccacgccggatatcggtttcttttttcacagaccaaagtatcatttgacctgtgaaacgattacaggcatttaaattccagttaagacccggtggtcaacaggagtgtgaaatgaggcgcttcgcaggcgcatgtcgtttcgttttcaatcgtgctctggcacgtcagaatgagaatcatgaggccggtaataaatacatcccttacgggaaaatggcttcctggctggttgagtggaaaaatgccactgaaacgcaatggcttaaagattctcccagtcagccattgcaacagagtctgaaagaccttgagcgggcttacaaaaacttcttccggaagcgggctgcttttccccgattcaaaaagcggggacagaatgatgcattccgctacccgcagggcgttaagctcgatcaggaaaacagccgtatttttctgccgaaactgggctggatgcgctaccggaacagccgtcaggtcacgggtgttgtgaaaaatgtcactgtcagccagtcctgcggtaagtggtacatcagtattcagacagaaagtgaagtaagtactccggttcaccctagtgcaagtatggtcgggctggatgctggcgtggctaaactcgccacgctgagtgatggcacagtctttgagcctgtaaacagttttcagaaaaaccagaagaagctggcgagacttcagcgacagttaagccgcaaggtcaaattcagcaacaactggcaaaagcagaaacgcaaaatacagcgactgcattcctgtatcgcaaatatccgcagggactaccttcacaaagtcacaacggccgtcagcaaaaaccacgcaatgatagtcattgaggatttgaaggtcagcaacatgagtaagagtgcagcgggtacggtcagccagccggggcgcaatgtccgggcaaaaagtggtttaaaccgtagcatactggatcagggctggtatgaaatgcgccgccagcttgcgtataagcagctctggcgtggcggtcaggtgcttgctgttccgccagcgtatacaagccagcgttgcgcgtactgtggtcatacagcgaaagagaaccgcctgagtcaaagtaaattcagatgccaggtatgtggatatacagcgaacgccgatgtaaatggcgctcgcaacattttagcggcggggcacgccgttcttgcctgtggagagatggtgcagagtggccgcccgttgaagcaggaacccaccgaaatgattcaggcgacagcctgaacgtagcagggatccacgtccttcagggcgtggaggatgtcaatatcggtttctgtcagcgattaaattcaacaccacgtaacaaacgcctccggcaattaatccccaaaacgcagaaccaatcccgaccagcgtcaatccacttgccgttaccagaaatgccaccaccgccgcgtctcgctcacgctcattatgcagcgcctgatacaaactgccgccgatggtacttaacagcgccagacctgccagcatctggatccaacttacgggcagggcagccatcatcccggtaatggcactaccaaacagacctgcgagcaaatagaaaatgcctgcaacggcagcggccagccaacgttgatctttatccggatgcgcttccgggctttggcaaatagccgcggtgattgccgcaataccgacggaataaacgccgaaaggggaaaaaaccagtgccagcaatccagtaaatacaattaatgggctaacaggagcgctatatccagctgctttcattgctgcgatacccggtgcgttttggcttgccatcgtcaccagaaaaagggggagtgcaacgctcaggctgtgagcaaagctaaaatcaggggtaatataagtggggagaacgggtttaaagacaacatcagttgtgacaacgtcaccttgcgcgatgacgatcacgatcccaataatcatcgcggcaattaccgcatagcgcggcgcaacggccttggttgccagccataccagcaacatacttccacacaacgtaaattgaccgtccagactggcaaacgcctgtaaaccaaagcgtaataaaatcccggcaagcattgccgccgcaaggctgtgcggaataatgcgcatcagacgagcaaagagtcccgttatgccgcagaggactattagcgcgttggtgacaataaaaacgccgatggcttcgttaagtgttagtccctgcaatccggtgaccaacaaagccgcgccaggcgtactccatgcggtgagaacaggtacgcgataccataatgtcagagtcagcgtactgacgcccattgccagccccagcgccgtcatccagccagagatttgtgcagtggtggctccggcgacaatcgctgcttgccagattattgccgcactactggcgtagccaattaataccgccagaaaccccgccagtagcgtgggtggaggaatagaaaacagacgcatagtcacctcgtgcgttatagcgtacaggcaccgtagcatttgtccgttataacgcacaagtgataaacttccgttttgccggaggagtcgcatggaaaatctcgctcgctttttatccaccacacttaaacaactacgccagcagcgcggctggagtcttagccgactggcagaagcgacgggcgtttctaaagcaatgttagggcagattgagcgtaatgagtccagtccgacggtcgcgacattatggaaaattgccaccgggttgaacgtaccatttagtacatttatttctccgccgcagtccgctacgcctagtgtttatgatccacaacagtaggcgatggtgatcactagcctgtttccttatgatccacaactctgctttgaacacttcagcattcagatggcatctggtgcaataagcgaaagcacgccccatgagaagggggtaatcgaacatgtcgtcgtcattgatggacaacttgatctgtgcgttgatggggaatggcagacccttaattgtggggaaggcgttcgatttgctgcagacgtcacgcatatctatcgtaatggtggggagcaaaccgtacattttcattccctcatccattacccgcgcagttaagcgggaaaactatttcgcaacgtcgcgcttgtggctaaaatagccgccatttttcagctactggataagaatgtgaccgtatcttctcatcgacttgaactgttaagcccggcacgcgatgccgccattgcccgcgaagctattttgcacggtgccgatgctgtttatatcggcggccctggttttggtgcccgtcataatgccagtaatagcttgaaagatattgccgagctggtgccgtttgcccatcgttatggtgcaaaaattttcgtcacgcttaacaccattttgcatgatgatgagctggaacccgcgcaacggctgattactgacctctaccagaccggtgtcgatgcgctgattgttcaggatatggggattctggaacttgatattccgccgattgaactgcacgccagtacgcagtgcgacattcgtacagttgaaaaagcgaagttcctctctgatgttggcttcacgcagattgtgctggcgcgagagctgaatcttgatcagatccgcgcgattcaccaggctacggacgcgaccattgaattctttattcatggggcactgtgcgtggcctatagcggtcagtgctacatttctcatgcgcaaacagggcgtagcgccaaccgtggcgattgcagccaggcgtgccgtttgccatacacattgaaagacgatcaggggcgggtggtttcctatgaaaaacatctgctgagcatgaaagataacgatcagactgccaacctcggcgcgctgattgatgctggtgtacgctccttcaagattgaagggcgttacaaagatatgagctacgtgaagaatatcaccgcccattatcgccagatgcttgatgccattattgaagaacgtggcgatctggcgcgcgctagtagtggtcgtactgaacatttctttgttccaagcacggaaaagactttccaccgtggtagcacagattattttgtgaatgcccgtaaaggcgatattggcgcgttcgatagcccgaaatttatcggcctgccggtaggcgaagtagtgaaagtggcgaaagatcatctcgatgttgccgttaccgagccactggcaaatggcgatggcctgaacgtgttgattaaacgtgaagtcgtcggttttcgtgccaatacggtcgagaaaaccggagaaaatcagtaccgcgtctggcccaatgaaatgccagcagatttgcacaaaattcgtccacatcacccactaaaccgtaatcttgatcataactggcagcaggcactgacaaaaacctccagcgaacgtcgggtggcggtagacattgaactgggcggctggcaggaacaactgattctgaccctcaccagtgaagagggtgtcagcatcacgcatacgctggacgggcagttcgacgaagccaataacgccgaaaaagcaatgaacaatctgaaggatggtctggcaaaactggggcaaaccctctattacgcccgcgatgtgcaaattaatttgccgggggcgctgtttgtaccaaacagtctgttaaaccagttccgccgtgaagctgctgacatgctggatgctgcgcgtcttgccagttaccagcgcggcagccgtaaaccggttgctgatcctgcgccggtttatccgcaaacgcatctgagtttcctcgcgaacgtatacaaccagaaagcgcgtgaattttatcatcgctatggtgtgcagctgattgacgcggcgtatgaagcacatgaagagaagggcgaagtcccggtgatgatcaccaagcattgtctgcgctttgcctttaatctgtgcccgaaacaggcgaaaggcaatatcaaaagctggaaggcgacgccaatgcaactggttaacggcgatgaagtattaacgctaaagtttgattgccgcccatgcgagatgcacgtcattggcaaaatcaaaaatcacatactgaaaatgccgttaccgggaagcgtagtggcatccgtaagtccggatgagctgctgaaaacattgccgaagcgaaaagggtaaaacgccagttttctggttactcacaacttattgaatctgcatgatattgcctgccgggtaaggcgttacgccgcatccggcatcaaatgactcaacgttgtcccgcttctggtttgcggcttttttgccagtaaaaatgctcgcgcaaaccttccgcgctctcttccgccacagcacgcaattcatcgctgtccgcttcatgacgcagctgatgatccacattctttacccacacaaattcatgtcctttgtgccctgccatgagttgtccactaaacagagcacacgttaataagacaacgcttaacgccttcgtaaacatcctgccacctttttcttaccttttgccgctatgatgccgatcgtttcttgaggttattattcagttttgcaaattagcgcaaagaaattctggaatcttccttcctgattttgcattgcattctgccgttgcggcgatttagtgctattttcgagcaaattacacacggaggtaaacactaatgtttactttgttgatatactcagcggcagggaggcgatgtgaaacaaagcgagttcagacgttggctcgaatctcagggcgtcgatgtagcgaatggcagcaaccatttgaaactcaggtttcatgggaggcgcagtgtcatgccgcgtcacccctgcgatgagattaaagaaccattgcgtaaagcaatcctgaaacaactcggtttgagttaatcgccaattaaaaaggttaatgacatgcgagagacagtcgaaattatgcgttatcccgtcactcttacacccgcgccggaaggcggttatatggtttcttttgtggatatccctgaagcgttgacccagggcgaaactgtcgctgaagcgatggaagcggcaaaagatgctttactgaccgcatttgatttttattttgaagataacgagcttatccctttacctagcccattaaatagtcacgatcactttattgaagtacctttgagcgtcgcctctaaggtattgctgttaaatgcttttttacagagtgaaatcactcagcaagagttagccaggcgaattggcaaacctaaacaggagattactcgcctatttaacttgcatcatgcgacaaaaatcgacgccgtccagctcgcggcaaaggcgcttggcaaagagttaagcctggtgatggtttaattacagttaacgaaaagttgtcatttttaacaactgatatagactgccgaatcatctgcacataattacgattcgataatgaaaaaataccagcagcttgcagaacaattacgcgagcagattgcgagcggtatctggcaacccggcgatcgtttgcctagcttgcgtgaccaggtggcgcttagtggcatgagctttatgactgtcagccatgcctatcagttgctcgaaagtcagggatatattatcgcacgaccgcagagcggttattacgttgcgccacaggcaataaaaatgccgaaagcgccagtcattccagtcactcgagatgaagcagtcgatatcaacacttatatttttgatatgttgcaggccagtcgcgatccgagcgtcgttccgtttgccagcgcctttcccgacccgcgacttttccccctccaacaactaaaccgcagcctggcgcaggtaagcaaaaccgccacagcgatgagcgtgattgaaaacttaccgccaggaaacgcagaactgcgtcaggctattgctcgtcgctatgccttacagggcatcaccatttctcctgatgaaattgtcattactgccggggcgttagaggcattaaacctcagtttgcaagcggtaactgaaccgggcgattgggtgatagtagagaatccttgtttctacggtgcgttgcaggcgctggagcggctacggctgaaggcgttaagcgtggcgacggatgttaaagaagggatagatcttcaggcgctggaactggcgttgcaggagtatccggtgaaagcgtgctggctgatgactaatagccagaatccactcggatttaccttaacgccgcaaaaaaaagcacaactggtggcgttgctcaatcagtacaacgtaacgctgattgaagatgacgtttacagcgaactttattttggacgggaaaaaccgctgcctgcgaaagcgtgggatcgccacgatggcgttttgcattgctctagctttagcaaatgtctggtgcctggttttcgtattggttgggtcgccgccggaaaacatgcacgtaaaattcaacgcttgcagttgatgagtacgctttccaccagcagtccgatgcaacttgcgctggtggattacctttccacgcgccgatacgacgcccatcttcgtcgcctgcgtcgccagcttgcggaacgtaaacaacgtgcctggcaggcactgctgcgttatctgcctgcggaagtgaaaattcatcataatgacagtggttactttctctggttggagctccccgagccgttagatgccggcgaattaagcctggcggcactgacgcatcatatcagtattgcgccgggtaaaatgttttctaccggtgaaaactggagtcgttttttccgttttaataccgcgtggcagtggggagagcgtgaagaacaggcggtaaaacaattaggcaaacttattcaagaacggctgtaatagcgtttaatttaattcctcttagattgggtaatatgaatttcgaatagcagtcatatttcctaactccttgactatactccagaagataaccttacagacggcataatgcgcggtagctcacaacctgaataaattttctcaggggcgaaggtgtgcctgcaagccgccgtctatggttaaacaaggagatatttttacggcacggcggctgaacaattaattacgacaggagtaagaccttatgagcaagacatttgcccgcagcagcctgtgtgcgctcagcatgacaataatgaccgctcacgccgccgaaccgcctaccaatttagataaaccggaagggcgactggatattatcgcctggccgggatacatcgaacgcggacaaactgataaacaatacgactgggtaacgcagttcgaaaaagagacaggctgcgcggtgaatgtgaaaaccgccgcgacttccgatgaaatggtcagtctgatgaccaaagggggttacgatctggttacggcatccggcgatgccagcctgcgtttgattatgggtaaacgcgtgcagccgattaataccgcattgattcccaactggaaaacgctcgatccgcgcgtggttaaaggcgactggtttaatgttggcggcaaagtttacggcacaccttaccaatgggggccgaacctgctgatgtacaacactaaaaccttcccgacgccgccggatagctggcaagtggtttttgttgagcaaaatctgccggacggcaagagcaataaaggccgcgttcaggcttatgatggccctatctatattgcggacgctgcgttgttcgttaaagccactcagccgcagttgggcatcagcgatccgtatcaactcaccgaagaacagtaccaggcggtgctgaaagtgctgcgcgctcaacacagtttgatccatcgctactggcatgacactaccgtgcaaatgagcgatttcaaaaacgagggtgtggttgcttccagtgcctggccctatcaggccaacgccctgaaagccgaaggccagcctgttgctaccgttttcccgaaggagggtgttaccggttgggctgataccaccatgctgcatagcgaagcgaaacatccggtttgcgcctacaaatggatgaactggagtttaacgccaaaagtgcagggcgatgtggcggcctggtttggcagcttaccggtagtgccggaagggtgtaaagccagtccgttattaggcgaaaaaggttgtgaaaccaacggttttaactatttcgacaaaatcgccttctggaaaacgcctatagcagaagggggcaagtttgttccctacagtcgctggacgcaggattacattgccattatgggcggtcgctaacttcgctggggtgctttatgacgtacgcagtggagtttgacaacgtcagccggttgtacggtgacgtgcgcgcagtagatggcgtcagtattgcgataaaagatggtgagttcttctctatgctggggccgtccggctccggcaaaaccacctgcctgcgcctgattgctggcttcgaacagctttccggcggggctatctctatctttggtaaacccgccagcaatctgccaccgtgggagcgggacgtgaatactgtctttcaggactacgcgctatttccgcatatgagcattcttgacaatgtcgcctatgggctgatggtcaaaggcgtgaataaaaagcagcggcacgcaatggcgcaagaggcgctggagaaagtggcgttggggtttgtacatcaacgtaaaccgagtcaactttctggtggtcagcgccagcgggttgctatcgccagagcattggtgaatgaaccgcgcgtattgctgttggatgaaccgctcggcgcactggatctcaaattgcgtgagcagatgcagctggaactgaaaaaactgcaacagtctctcggtatcacttttatcttcgttacccacgatcagggcgaagcgttaagcatgtccgatcgtgtggcggttttcaataatggacgcattgagcaggtcgattccccgcgcgatctctatatgcgcccgcgcacgccgtttgttgccgggttcgttggtacaagcaatgtttttgatggactgatggcagagaaactttgtggcatgacgggaagcttcgccctgcgaccggaacatatccgcctcaacacccctggtgaactgcaggccaatggcacgatccaggcggtgcaatatcagggcgcggcaactcgttttgaactgaaattgaacggcggtgaaaaactgcttgtgagtcaggccaatatgacaggcgaagaactgcctgccacgctcacgcccggacaacaggtgatggtttcctggagccgtgatgtgatggtgccgctggttgaggagaggtgaatggcgatgaatgtattgcaaagtcctagtcgtccaggtctgggtaaggtgtccggtttcttctggcataatccggggctggggctgtttttactgctgcttggcccgctaatgtggtttggcattgtctatttcggcagcctgctgacactgttatggcagggattttatacttttgacgatttcaccatgagcgtaacgccggaactgacgctggcgaatatccgtgcgctgtttaatccggcgaattacgacatcattctccgcacgctgactatggctgtggcagtcactatcgccagcgccattctggcttttccaatggcgtggtatatggcgcgctataccagcgggaaaatgaaagcgtttttttatattgcggtaatgttgccgatgtgggcgagctacattgttaaagcctatgcctggacgttattgctggcaaaagatggcgtggctcagtggtttttacaacatcttgggctggaaccactgctgactgcgttccttacattacctgcggtgggcggaaatacgctgagtacttccgggctggggcgctttctggtgtttctctatatctggttgccgttcatgatcctgcccgttcaggcggcgcttgagcgtttgccgccgagtttgttgcaggcgagcgctgatctcggcgcacgtccacgacaaacctttcgctatgtggtgctgccgctggcaatcccgggtattgccgctggctctatctttaccttcagtctcacactgggcgattttatcgtcccgcagctggttggtcctccaggatattttatcggcaatatggtttattcccagcagggggcgattggcaatatgccgatggcggcggcattcaccctggtgccgattattctcatcgcactgtacctggcgttcgtgaaacgtctgggagcgttcgatgcactctgaacgcgcaccgtttttcctcaaactggcggcctggggcggcgttgttttcctacattttcccatcctgataatcgccgcctatgcgtttaacactgaagatgcggcgtttagttttccaccgcagggcctgacgctgcgctggtttagcgtggcagcacagcgtagtgatattcttgatgccgtgacactgagtcttaaagtggcggcgctggcgacattaattgcgctggtgttagggacgctggcagctgccgcgctgtggcgacgagactttttcggcaaaaacgccattagcctgttactgctgctgcccattgcgctgccgggcattgtcactggtctggcgttattaaccgcctttaaaaccatcaatctggagccgggatttttcaccatcgtggtcggtcatgcgactttttgtgtagttgtggtgtttaacaatgtcatcgcccgttttcgccgcacctcctggagtctggttgaggcgagtatggatcttggggccaatggctggcaaaccttccgctacgtagtgttgccgaatctcagtagcgcgttactggcaggaggaatgctggcgtttgccttgagcttcgatgaaatcatcgttacgacctttacggcaggtcatgaacgaacgttaccgttgtggttgctcaatcagcttgggcgaccgcgtgatgtaccggtaactaacgtggtggcactgctggttatgttggtaacaaccttgccgatcctgggggcctggtggctaacccgcgaaggcgacaatggtcaataaccactgatacaggaatatgctatgcaacataagttactgattaacggagaactggttagcggcgaaggggaaaaacagcctgtctataatccggcaacgggggacgttttactggaaattgccgaggcatccgcagagcaggtcgatgctgctgtgcgcgcggcagatgcagcatttgccgaatgggggcaaaccacgccgaaagtgcgtgcggaatgtctgctgaaactggctgatgttatcgaagaaaatggtcaggtttttgccgaactggagtcccgtaattgtggcaaaccgctgcatagtgcgttcaatgatgaaatcccggcgattgtcgatgtttttcgctttttcgcgggtgcggcgcgctgtctgaatggtctggcggcaggtgaatatcttgaaggtcatactagcatgatccgtcgcgatccgttgggggtcgtggcttctatcgcaccgtggaattatccgctgatgatggccgcgtggaaacttgctccggcgctggcggcagggaactgcgtagtgcttaaaccaagtgaaattaccccgctgaccgcgttgaagttggcagagctggcgaaagatatcttcccggcaggcgtgattaacatactgtttggcagaggcaaaacggtgggtgatccgctgaccggtcatcccaaagtgcggatggtgagcctgacgggctctatcgccaccggcgagcacatcatcagccataccgcgagctccattaagcgtactcatatggaacttggtggcaaagcgccagtgattgtttttgatgatgcggatattgaagcagtggtcgaaggtgtacgtacatttggctattacaatgctggacaggattgtactgcggcttgtcggatctacgcgcaaaaaggcatttacgatacgctggtggaaaaactgggtgctgcggtggcaacgttaaaatctggtgcgccagatgacgagtctacggagcttggacctttaagcagcctggcgcatctcgaacgcgtcggcaaggcagtagaagaggcgaaagcgacagggcacatcaaagtgatcactggcggtgaaaagcgcaagggtaatggctattactatgcgccgacgctgctggctggcgcattacaggacgatgccatcgtgcaaaaagaggtatttggtccagtagtgagtgttacgcccttcgacaacgaagaacaggtggtgaactgggcgaatgacagccagtacggacttgcatctagcgtatggacgaaagatgtgggcagggcgcatcgcgtcagcgcacggctgcaatatggttgtacctgggtcaatacccatttcatgctggtaagtgaaatgccgcacggtgggcagaaactttctggttacggcaaggatatgagtctttatgggctggaggattacaccgtcgtccgccacgtcatggttaaacattaaggataatattgcagatcgtaagagtatgagatgatcttgcgtactgtcagagcactgatttctctgacagtacgtgctgcgtgcaaaatcactacatcaaataaaccagccaaatctcatagagataagagtaaacaaaccaacagcagcaaagaaatttatcagtactacagttctactggaaacattcatttttgccaccttttatcattgcccctatgtgtatagtacgggttaagaaaatccgcaataatactcattctgaagatggataagggcaagttgctgtttgatgattttttctcaaactggtgaaaaaacttgatgcacgtcaaaaaatgacgcatatttgcgcgcgttttattcatctggctggacgcccgtacatgtctctctatcaacacatgcttgttttttatgcggttatggcagcaatcgcatttcttatcacctggtttctttctcacgataagaaacgcatccgtttcttaagcgcctttctggtgggggcaacatggccgatgagtttcccggtggcgctgttgtttagtctgttttaaatcttactcactggcttgacggcaccacgcagacttatatcatttggatgaatcgataaatttcacaagtggctaaggagaaagtatgagccatctggatgaagtcatcgcgcgcgtggatgccgcgattgaagagagcgtcattgcccatatgaacgaattattaatcgccctgagcgatgacgcggagttaagtcgggaagatcgctacacccagcagcaacgtctgcgcacagcgatcgcccatcacggtcgcaagcataaagaagatatggaagcgcgccacgaacagttaaccaaaggcggcaccatcctctgattaaaaactgcgtctggctaccaaccaggcgccaaccacaagtaaaattgcgccacaaattgggccgaacaacgcccgtagtggtacgccatgactgcggaagatatccagcatcagaccgccaatcagctgactggcgaccagtacagcaatagttgtcgccgctcccacattctgatatccgctgatactggcgaagacaaaaaagcttcccagcaagccaggtataagtgtccaccagcgcacgctggacaccagttcgccaaaccccgccatgccttgtttaaaccataaaatagaaacaaagagcacaatccccaccagactgttcagcaacatggcgatgagaatggtagaggaggtctgggtgatgcgcaccatcagcgtgttctggacaaccagaccaattccggcggcaatcaaaaaagcaagggtgaggctctgattcatccaatcgcgtccggttcagtgcgctcgtcgagttgcaactgcataaatgtcagatccagccaacgaccaaatttagtgcctacctgcggcatttgcgcggtgacgacaaatcccaggctctggtggagatgcaggctggcctgattttggctttcgatcccggcgaccatgacatgcttcccgcaatcccgcgcttcatcaatcaatcggcttaacaatttacgccccagacctttgccctgatgatcgggatggacataaacgctatgttccacggtatggcgaaaaccatcgaaactacgccagtcgccaaagctggcatatcccgtcactacgccgttttcctcgctcaccagcactggataacctgctaaagtccgcgcttcaaaccaggcaatgcggttatcagcatccaccgtttggtcattccagatagccgccgtatacaacacggcgtggttataaatttccgcaatggcagcacagtcggctttgcgggcaaaacggatggacatgtctggcctcaataaaataatgatgatgatgttatcaatactatcgaaaacagcccgaagcaacggattcctcgatgaaattattgcgtgttgcagaggggatgtgacggctgcaaacaaaaccaatcccgtgagcctgctactattgatggattcatgccaaaagcacaggagagcattatggggcaacaaaagcagcgtaatcgacgttgggttctggccagccgtccacatggcgcacctgttccggagaatttccgtcttgaagaagatgatgtcgccacaccgggtgaaggacaggtgttactgcgcacagtttatttgtccctggacccgtatatgcgtggacgtatgagcgatgagccatcttatagtccgcctgttgatattggcggcgtgatggtcggcggtacggtgagccgtgtcgtggagagcaatcatcctgattatcagtctggcgactgggtgctgggctacagtggatggcaagactatgacatatccagtggtgatgatctggtgaaacttggcgatcatccgcaaaatccaagctggagcctgggtgtgctagggatgccaggctttaccgcttatatgggcctactggatatcggtcagcctaaagagggcgaaacgttggtggtagctgcggcgacaggaccagtgggggcgacggtggggcaaatcggcaaacttaaaggttgcagagtggtgggggtagccggtggcgcggaaaaatgccgccatgctaccgaggtgttaggcttcgatgtttgtcttgatcaccacgcggatgattttgccgaacaactggcgaaagcgtgcccaaaaggtattgatatctattatgaaaacgtgggcggtaaggtattcgatgcggtgctaccgttacttaatacatctgcgcgcattcccgtctgcggattagtgagcagctataacgctacagagctaccacccggtccggatcgtttacctctgttgatggctacagtgctgaaaaaacgtattcgcttgcaaggttttattatcgctcaggattatggtcaccgcatccatgagtttcagagggagatggggcaatgggtgaaagaggataaaatccactaccgcgaagaaattactgacggtttagagaatgcgccacagacgtttatcggcctgctgaagggtaaaaacttcggcaaagtggtgatccgcgtggcgggtgatgattaaagtttcaacggcggcgtaagccgccataaaaatccaggcaaaaagcttattttcagctttaattaactaaccacatcattgttctgctgctaataacaacaaaggtgagtggtttatgattattcactttaatacaccaggtgaattccttctgccatgcaggcagggttggacagaaaacacgcgaaggaattaaaatgcctggaacgggaaaaatgaaacatgtcagtttgactctgcaggttgagaacgacctgaaacatcagcttagtattggcgcattaaaacctggcgcacgcctgattactaaaaatctggcggagcaattaggtatgagtattacacctgtgcgtgaagcattattacgtctggttagcgtgaatgcgctttctgtcgcacctgcacaagcatttacagttccggaagtggggaaacgtcaattagacgaaatcaatcggatccgctacgaactggaattaatggcagttgctctggctgttgaaaacctcaccccgcaagaccttgcggaactccaggaattgctcgagaaattacagcaggcgcaagaaaagggcgacatggaacaaatcattaatgtaaacaggctatttcgcttagcgatttatcatcgcagtaatatgcccatcctgtgtgagatgattgagcaactgtgggtcaggatggggcctggtttacattatctctatgaagcgattaatccagcggaattacgggagcatatagaaaactatcatctgttactcgctgcgttaaaagcaaaagacaaagagggatgcagacattgtcttgctgaaattatgcaacaaaatattgctattttataccagcaatacaatcgttaaagtaaatgcccggcaaataccgggcatcaaggtaattactcaaatctccacgcaatattcatgccgacaccataatttcgtccggggctaggttcgtaatatcgcccgttactctcattgacaatgacagaaccaacgtattctttatcgaataaattatcgacacgaccaaataaatccacagttaaattgtggtaattgtatttatacccggtgaataagccgacgagagtataagacggcgcttttgccgtattttcatcatctgccataatatcgcccatataacgcgcttccgtgcctgcataccaaccatcttccggtacataacctatgctcgcaaagcccatattacgggcgatccctggcatccgattaccgttacaatcctgttcattgcaaacattgctgcgataggtcgcatcaagccaggtccaggacgcgtttacgcgaaaatctcctgcgaaacgttgatcccatgccagttcagcgccttgacgacgggtctttccggcatttttgtaagtcgtacgcccaccgctactgctatcgacaacaatttcatcatcagtgtcggtctgaaacaatgcgagactaagcagcccatcaccaatacgcgttttactgccgatctcaattgtatcgttggtggatggttttaaacctaagttcataccgctttgcccatcagcacgataagacagctcattaatcgtcggcgtttcaaaacctcgcccggctgccagatagatattccaggcatcggtcattgcatattttaagctaccggcaggtagccatttatgataactggcatcaccgctgtcatcgccgttacccggagtaacgtaatggtcgttggaatcaaaccacacggagctgtagcgcacgccagcatccaggctcagtttttcgctcagctgccactgcgtctgtaaatagggatcgatgttccacatcagattgcgttcgtcgcgacgcaactcacctttttgcccgtactccggcatgccgctattcaggcggaagttattgtagcccttgcggttttcactcatgttttcgtagttcaggccggtagtgaacgtgaccggaacgcccagttcaccacggtgtgtccagcggctgtctattccctggtaatggcgttgcagggtaatcacgccgcccgcatgactcgggttaagttgtggtgccatgggtatactctggtactgggtcgtttctcgctctccggcatacatcatcacactcatatcatcccggctactcaggctacgctcatagcgcaacccagcctgagtttgcttgatggtttttcgcgtgtcgtactgttctgcacgaggcgcttgttgtggattagccttccattctgctttggttagcccacctgggtcatctgctttgatatccacactattgaaaatcagacttaatttgctggcttcatcaatgcgtacgcccagtttggcattggctaaatttttctgtgcgccactatggtcacgatagccgtgggtcgtaaaacgcgtggtactgacggtgtaatcgacatcgccaggctgtgtgccgtctcccgttgcgcccgttgctttcagcccatagcgccagctgccaaaactgccgtagtaactactggcttcaatggttggtggctgttgtccggtctgggtggtgacattcattaccccaccagacgcgttgccatacagggcagagaaggggccacgcagcacttccacattttgcacactgcttaaatcgatgttggatgtttgcccttgcccgtcgggcatggtggcgggaataccgtccacatacaggcgaataccgcgaataccgtaagtggagcgggagccaaatccgcgaatgctcagctgtaaatcttgcgcatagttctgccggttttgtacctgcaaaccaggcacgccggtcagactttcggacaagttaatgcgcggtgttgccaggcgcatctcctcgccatccaccacgcttactgctgctggggtatccagttcactaaccacctgcggtgcggcactgacaatcatagtctgttcatcagcggcaaaaacaacgggggaaaggacaagcagtgcgggcaaaacggtctgtcggacggaaaaaatcttcatgaaaaaagccaggttaagaatgggaaaacgccgtcatggtaatgaaattgtaaatttatggaaaatgaaacggcacaatacgttaagtaattgagaaaattgtagtcgtaacggcaagaaatgctccacatttgagaaaataatgattaccattcccatttataacaagagcgtaacgatgattacgcttagcgaagcattgtgaagcagcaaaaatatcggttcatcaaagggagtcgtcatgcatttacgtcatctgtttagtagccgcctgcgtggtagtttactgttaggtagtttgcttgttgttagtagtttcagtacgcaggccgcagaagaaatgctgcgtaaagcggtaggtaaaggtgcctacgaaatggcttatagccagcaagaaaacgcgctgtggctcgccactagccaaagccgcaaactggataaaggtggcgtggtttatcgtcttgatccggtcactctggaagtgacgcaggcgatccataacgatctcaagccgtttggtgccaccatcaataacacgactcagacgttgtggtttggtaacaccgtaaacagcgcggtcacggcgatagatgccaaaacgggcgaagtgaaaggccgtctggtgctggatgatcgtaagcgcacggaagaggtgcgcccgctgcaaccgcgtgagctggtagctgacgatgccacgaacaccgtttacatcagtggtattggtaaagagagcgtgatttgggtcgttgatggcgggaatatcaaactgaaaaccgccatccagaacaccggtaaaatgagtaccggtctggcgctggatagcgaaggcaaacgtctttacaccactaacgctgacggcgaattgattaccatcgacaccgccgacaataaaatcctcagccgtaaaaagctgctggatgacggcaaagagcacttctttatcaacattagccttgataccgccaggcagcgtgcatttatcaccgattctaaagccgcagaagtgttagtggtcgatacccgtaatggcaatattctggcgaaggttgcggcaccggaaagtctggctgtgctgtttaaccccgcgcgtaatgaagcctacgtaacgcatcgtcaggcaggtaaagtcagtgtgattgacgcgaaaagctataaagtggtgaaaacgttcgatacgccgactcatccaaacagcctggcgctgtctgccgatggcaaaacgctgtatgtcagtgtgaaacaaaaatccactaaacagcaggaagctacccagccagacgatgtgattcgtattgcgctgtaatagatatggcgagggtgaaaacggtgagacttgcctgccttttatcacggcgtatccggcactttcgtcagtaatctgaatttgcccggcacgtagccgggcaattttgcaattaactcgccgtttcaggcttaaacacaatttcctgtttttcttcatcttcctcgacgactggcgcagtgctgtgaatttcagcaacgcgtttgcgcacaccaaaccagcctataaccagcaaaataccgataatcggcagcgccgcgatagtataagtcccgttcgggtaatcgaacgccatcagcacaaggacactcagtaaaaacagtaatgtcagccaggaagtgaagggcgcgccaggcagtttaaaactgacatccgctgctttgccttctttaatcgctttacgcaggcgcatctggcacacgatgataaacgcccaactagcgatgattcccaggctcgcgaagttcaacacaatctcaaatacgcggctcggcaccagatagttgaggaatacgccgacgacatacacaactagtgtcgccagaatcccggcatacggcacatgctgacgactcattttcgccataaaactcggtgcggaaccgcccatcgccatactgcgcagaatacgtccggtgcagtacagaccactattcaggctggagagggcagcggtcagcaccacaatgttcataatgctgccgatatatggcacacccagtttagagaaaaacgtcacgaacggactttgccccgcctgatacgcgctccacggcaataacataaccagcaacaccacggagccgacgtaaaacaggccaatacgccaaatcacactgttaatggctttaggcaccatggtctgcggatctttacattctccggcagctgtacccaccatttcaatggaggcaaaagcaaacactacgccctgaatcaacaccagcgcaggcagcaaaccgtgggggaagaagccgccattatcggtgattaaatgaaagccagtggtgttgccatccagcggctgaccactaccgaggaacactgtacccacgaccaaaaaggtcacaatggcgagcactttaataagcgcaaaccagaactccatctccgcaaaccatttcacaccgatcatattcatggtgccaacgatggtaagtgcagcgagcgcaaagacccactgcggcacgccgccaaacgcaccccagtaatgcatatacagagcgacggcggtaatatcaacaatccccgtcatcgcccagttgatgaagtacatccagccagcaacataagcggctttctcacccaaaaactcacgggcataagaaacaaaactgccactggaagggcggtgtagcaccagctcacccaatgcacgcagaataaaaaagctaaacaagccacaaattaaataaaccagtgccagtgcgggccccgccatttgcagtcgggctcctgcacctaaaaacaagccggtgccaatcgcgccgccaatggcgatcatctgcacctggcgattgcccatcgctttgtgatacccctcttcgtgggcattaagccagcggcgtttcgcggcgtgttgatcactagtgtcggtgtcgtgtttactcattgctctccctgattgctttaatgaaaaagtcatataagttgccatgaacaatgtttattcatcctggcgatgatagttatcaccattattctttatgggtataaaactatcggcgcagcatcctacccgttatcgataaacgatgcaaaacatccccttacaatcctgaaggggattaatacaactgacgaaaaaatgacaaatccttttgctggttaacctgtgtactgtcctacacttaatctttaaaagattgtgaggggcatatgattaaggtgtatggcgtacccggatggggctctacaatcagtgagctgatgctaacactggctgatattccttatcagttcgttgatgtcagtggttttgaccacgagggagctagtcgcgagttattgaaaaccctgaacccgttgtgtcaggttccgacactggcattggaaaatgacgagattatgacggagacagcggcgattgcattgatggttctcgatcgtcgcccggaccttgcgccaccggttgggcgcgccgaacgtcagctgtttcaacggctattggtctggctggttgctaatgtctatccaacattcactttcgccgattaccctgagcgttgggctcctgacgcacctgaacagttaaagaagaatgttattgaatatcgaaaaagcctttatatctggttgaatagccagctcactgctgaaccttatgcgtttggtgagcaactaacgctggtggactgttatctttgcactatgcgcacatgggggcctgggcatgaatggtttcaggataatgccacgaatatcagtgcgattgctgatgctgtatgtcagttaccgaaattacaagaagtattaaaaaggaatgaaattatttgagtgggataccagaagattatgttatttattattcagtaactttatccacaatgatgggcgtaattaattaaattcatggtatgttttttaatttatatcactctccttttcattcagcgtgtctatttcatttcctctgaaaagaaactaactattcacatcgtgcagatgtttcagttgttaagtcaggcattctataatctcaaaatgtttttaatgatggatatgctcggagttggagatgcaattaatattaatacaaataaaaatatccggcaggtatgctaaaaggataaatggcgttctctgtatttattcgcaattatctgtaggacaaatatggagagcttgatgagtcagagctaaaacagcaattgattaataaacatgttgatttattcaagaaaatggatgtattttaaatgttgattcttaatataacctaatcaatagattatcaagtgagagctacacattattggaggggcaggggaaaacaccattttgggaacaatgcatcaggtactcttaccactgaagcaagatcatccggcaccaggtggtggtgcagtgctttggaaatggtcccctcgggggagttgtcattattttctatgctatttgcttattatattcatcaggtgaatttaataaattcctaatttgaaatatccactattaagctagtgtttaacgacgttaagatggcaatgtgcagatcatgttatcagggtggggcggtagcgtatattccttatacaaaccatcattcatttcaatgattgttattgaattatttattgttgtgaataaaaagacattatgaatattggtttgactttgcatatcaggttttttattactcgctgtaatgtacgagcctgtcgtgaataacgtcgagaacccatccgttgcgtttgtgattattttgttgactaaacagacacccgtttctctgaagtaaaatcccagactaaatcatcacataaccatgacatttttctgatattccccggtaacgccagataacgatgccaaatttaccgttatgttcaatcaactccctggtccatgtcgatttatctaccacaatcgccacgcgtggaggttcaaactccaccggcattgaccaggctgcagccataatgttacgccgctgggattgctcatcgaaactggtgatcaagaccgttgggccatgatttaacagacggctggcatggtgtaattctatggggatgaatcggctcatggtatcgcctcgcgaagaaggtttttttaagcgtagtccgtaacgcaataagtaacgaaattaacgggattggcgatttgcgaacgtgatgcatgtccgcgatcgcacaaaatagccggtgcggcgtctattccaggttataagttgagaaaaccactaagggaaacgcctgatgacgcccattctgaatcactattttgcccgtattaactggagcggagctgctgcggtcaatattgatacgcttcgtgcattgcacctgaaacacaattgcaccattccgtttgaaaacctcgacgttttgctgccgagggaaatacagcttgataatcaaagcccggaagagaaactggtgatagcccgtcgtggcggttactgttttgagcagaatggcgtgtttgagcgggtgttacgcgagctggggtttaacgttcgcagcttgttagggcgcgtagtgttaagtaatccgccagcattaccgccgcgcacccatcgtttgctgttggtggaactggaagaggaaaaatggattgctgatgtcggtttcggtgggcagacgctaaccgcgccgattcgtttagtttccgatctcgtgcagaccacgccacacggagagtatcggttgttgcaggagggtgatgattgggtgttgcagtttaatcatcatcagcattggcagagcatgtaccgttttgatctctgcgagcagcaacaaagcgattatgtgatgggcaatttctggagcgcgcactggccgcagagccattttcgccatcatttgctgatgtgccgccatttgccggacggcggcaagctgacactgaccaattttcattttacccattatgaaaatgggcacgcggtggagcagcgaaatctaccggatgtggcgagtttatatgctgtgatgcaagaacagtttggtctgggcgtggatgatgcgaaacatggctttaccgtggatgagttagcgctggtgatggcggcgtttgatacgcacccggaggcgggaaaataatttatgtcaggttgccggatgcggcgtaaacgccttatccggcatacattagcccggttgtagacctgacaggcgaagcgcatcagacaacggtttcagagttcaattgcccattcggcatgaaacaaaatcaccgctgtgccactaatggtgactttttccggttggttatcacgaattgtcaccgtcacttcaatcataccgtcacgccccaatgcgcgcccctgatggcctttaacacgcaacacgttgccatcgtggggcaatacgttgtgatgtaccaaccatgcacccatcgggccattggcattgccagtcaccggatcttccacaataccaatcgcagggctgaacatgcgaccatcggtttcgtttttgcctgggcggatctggaacgggaagaaaccattgcagccaatctttttgctgatagcggtcagcgcattaaggtcagggctaagggcgtcgatatccacttccggtttcagtgggatcatcactttactgtgtcctgttgttgccacctgaattggcaagcctggcagaatatcgtcctcagtgagatgaagcgcgttgataatcgccgcacgtgtttcaccttccagcggtggctcaaagcccggcgtaccttgttccaggctaatacgataatcatcgttgtgcttttcgatagtcacgcgatgttttcctgccaggcttgtttgccagatcgtgcaatttcctaaacctaacaccttcgcacgtacatagtgcgcagctactgtcgcgtgaccgcaaatcggcacttcaaccgttggcgtaaagtagcggatgcgcacatcgctgtcgtcgctgtgcagcagaaaagcagtttcgctatggcctaactcgcgggcgataagctgcatttgcgcttcgctaagattatcggcggggaaaacaacaccggcagaattgccgcgaaacggttgactggtaaaagcatcgacgtggtacacctgcggtttcattaacgttctcctgtgactggagaactatcatagcctgcaagtggccggagagcgaagggctatccggccagggtgaaattatcgccggctacgcacaatttgatatcgacgagtaaagtactcaaacggcgcgctccacacatgcaccagtcgggtgaacgggaagagcaggaagatggtcattcccaacaccagatgcaggcggaagacgaacgctacgccgttgagcatctcactgcttccaccacggaaagtgacaatgctttgcgcccaacccaccagcttcatcatttcgctaccatcaggatactgtgcactaaacggtatggtacttagccccaacagacactggatcagcaaaatgctcatgatgatgatatccggcgtagtggaagtggcacgcacgcgctgatttgtcagcctgcgccacagcagtcctgcgccgccaatcaacgtcaacacaccgcaaataccgccgagcaccatcgccatgagttgtttcgctgccactggcaaaaaccacgcgtacatccagtgcggcgttaacatgccgaacaagtgcccgaagaaaatccccaaaatgccgatatggaacagattgctccatatcaccatcccgcgtttatcgagcatttgactactggaggcgcgccaggtgtactgcccgtagtcgtagcgcagccagctgccgaggaaaaacaccgtcgcacaaatgtacgggtagatatcgtaaaaaaagacgttcagatactgaatcatttcccacctcccgcactgatgtcgacatattgcggcgcgacatcctggctaaagcgtcgctgatattgattaagcgggctgctgtcacacgccgtggcgttatcttcaataaacttcacctgttcctcttcccacactgcatcaagcgcctggcgggtgtcatcgcgctcttcgctgtttacttgttttgtgacactgtcactactaagggagcttcccgccagttgcagcagagcatcaaacaacgcgtaccacggtgcctcgcgttgttttaagcgaccgccaagcagggcgaggatcggcgcaacattgagcaatccttctttcgcctgatcgtcaggcagtacgcttaaatactccagatacagcggtagataatcgggcagttcccgacaatccagctgcaggccgaccttttcatactccgccagcaggtccaccattgcctggccgcgatcgcgggactcggcatgaacatgttcgaacagcagcaggctcgtggtgcgcccgcggtcaaacacttcgcaccattcggcctgtttatccagcagcggcgcgttaagcaggttgtgggtgaaatccgtaagcatcggcgcgtcgcggcggatcaacgccagcgcgtcctccttgcattcccacaacagctcgtccggatactccatcaacaggccgatcactttgaggatctgcattattcgccctccgctttgtcgcgcacttcggtgatgttgatggcatcgatacggctactgttgaacaggttgaatttactgtcgctaccgtggcaaccgtcgccaaaggtaaaaccgcagccgttgcgttctgcgaaggcatcgcccgccatttcccgatggctggtcgggataacaaaacgatcttcatagttggcaatggcgagatagcgatacatctcttcgacctgggcgacgctcaggcctacttcgtcgatggcacgagtatcagtaacgccttccacggtttgactacgcatatagtggcgcatcgccatcatccgtttcagcgcccgcagtaccggaccggtatcgccggcactcaacatattggcgagatattgcaccggaatacgcaggctttcgatggcgggcagcacgccttcgcttttcggcaaaccgcccgcatctgcgtaggactgaatcggactcagcggaggaacgtaccagaccatcggcagggtgcggtattcagggtgcaacggtagtgccagtttccagtccatcgccattttgtagactgggctacgctgggcagcgtcaatcacattttgtggaataccttgtttcagggcttcctcgatcacactgggatcgtgtggatcgaggaacacttcgcactggcgttcatagaggtcaacttcgcgctcggtgctcgccgcttcctcgatgcggtcggcgtcgtaaagcagcacgcccagataccggatgcgacccacgcaggtttcactgcacacggtcggttgaccggactcaattcgtgggtaacagaagatgcatttttcactcttgccgcttttccagttgaagtagatttttttgtacggacaaccgcttatgcacaaacgccagccacggcatttatcctgatcaatcagcacaatgccgtcttcttcgcgtttgtagatagcgccgcttgggcaggtcgccacgcagctgggattgaggcagtgttcgcacaggcgcggcaggtacatcatgaaggtgttttcaaactgcccgtacatctccttttgcatggcctcgaagttgcggtcgcgggcacgtttttcgaactcaccgcccagcagttcttcccagtttggcccccagatcactttgtccatccgtttgccgtcaatcagactacgcgggcgagcagtaggaatatgtttgccttccggtgcgctatgcaaatgttcgtagtcgaaggtgaaaggttcgtagtaatcatcaatctgcggcaccaccgggttggcgaagattttggttattacgcccatcttgttgcccagacgcgggcgtatcttgccattcacatcacgcacccagccgccttgccactcttcctgatcttcccagtttttcggataaccaatgcccggtttggtttcgacgttgttaaaccatgcgtactccatgccttcgcgcccggtccagacgtttttacaggtcacgctacaggtatggcagccgatacatttgtcgaggttaagcaccatgccgacttgactacggattttcattttttcgcctcctgtacctgatcgcgaccttcatcatccagccagttaacgttcttcatcttgcggatcatgatgaactcatcgcggttgcttccgacggtgccgtagtagttaaagccccaggccagctgcgcgtaaccgccaatcatatgcgttggtttcgggcaaacgcgggtaacgctgttatgaatgccgccgcgcatgccagttacttcgctaccaggaatattcataatgcgttcctgggcgtgatacatcatggtcatgcccggcggtacacgttggctgaccaccgcgcgggcagtcagcgcgccgttggcgttgaatacttccacccagtcgttatcgacaatggtcagttctcgggcatctgtttcgctgatccagacaatcggtccaccgcgagagagcgtcagcattagcaggttttcactgtaggtactgtgaatgccccatttctggtgcggcgtcaggaagttaagtgctttttccgggaagccgtttggcggtatctggcgcatctcactgacgctacgggtgtcgataggcgggcgataagccaccaggctttcaccaaaagcacgcatccacggatgatcctgatagagctgctggcgtccgctcagcgtgcgccacggaattaactcatgaacgttggtgtatcccgcgttataggagacgtgatcgctttccagaccggaccaggtggggctggagataattttacgcggctgcgcctgagtatcgcgaaagcgaatcttctcgtcctctttgtgcagcgccagatgggtatgttcgcgcccggtgatctcgcccagcgcctgccacgctttgactgcaacatgaccgttggtttccggtgccagtgccagaatcacttcactagcgtcaatggcggtgtcaatcagcggacgcccctgtgccgggccatcacgcttggtgtaattgagtttgccgaggaaatcgatttcatcctgggtattccagctaatccctttaccgccattgccaagtttgtccatcaatggcccgaggctggtaaagcgttcatacgtagcagggtagtcgcgctccaccgccacaatattcggcgcggttttgcctggaatcagatcgcattcgcctttgcgccagtcgagcacttcacacggctgactgagctctgccggagagtcatgcagtaggggttgtaataccacgtcggtttctttgccaagatgacccacgcacacttggctaaatgctttggcgatacctttgtagatttcccagtcgctgcgactttcccacgccggatcgaccgccgcagaaagcggatgaataaacggatgcatatcgctggtgttcatatcgtctttttcgtaccaggtggcggtgggcagaacgatatcggagaacaggcaggtactggacatgcggaagtcgagcgtcaccagcaggtcgagcttgccttcaatcgctgcagtttgccactcgacttcttccggtttgatcccgtcgctggcaccgagttcctcgccctgaatcccgctttcggtccccagcagatacttctgcatatactcgtggcctttgccggaggagccaagcaggttagagcgccagacaaacaaattacgcggatgattgctgctgctatctggttgttcgcaggccatacgtaaatcgccgcttttcagcgcctgggcggtaaattctgtgggggataatccggccttgtcggcttcagctttaatcccgagcgggttacgccccagctgcggcgcagaaggtagccagcccatacgttcggcgcgaacgttgaaatcaatcagatgaccgctgtacttactggcatcggcgagcggactaagtaactcctgagcagagactttttcatagcgccattggctggaatgattgtagaaaaagctggtgctgttcatttggcgcggtggtcggttccagtcgagcgcaaaggccagtggcaaccagccggtttgtgggcgcagtttttcctggccgacatagtgtgcccagccgccaccgctttgcccgacacaaccgcagaagatcagcatattgatcatcccgcggtagttcatgtccatgtgataccagtggttaacacctgcgccgaggataatcatgctgcgcccatgcgttttatgggcggtatcggcaaattcacgggcgatggtttcaatatactggcgcggcacgccggtaatttgctcaccccaggctggggtgtacggtttgatttcagcgtaatctttcgcactgttttcatcttccagcccgcgatcgaggccgtaattcgccagtaccaaatcataaacgctgaccaccggacaggtgttgccatcgactaacgtcaggtttttaacgggcaattggcgcaccagcaccggattgtgttttacgctgcgaaaatgcggattttcaatgccgccaaagtaggggaaggccacgcctgcaacagcgtcatgttgaccgagcagggttaagctcaattcggtttccgtaccggcggcaatggattccagattccatttgcctttttctccccagcggaaaccaatgctaccgttcggcactaccaattcacctgcggtattaactgctacggttttccactgcggattgttgctttcgcccagtccatccaccaggtcagatgcgcggatcatgcgcccgggaacgtagctaccatcgtcgcgaggctccagcattaccagcatcggcatgtcgctgtagcggcggcagtagttgataaagtagtcgctgggattatcgagatgaaactcttttaaaatcacatggcccattgccatcgccagggcgctatcagtgccttgtttcggtgccagccactggtcgcacaatttggccacttcagagtagtcaggggtaatggcgatggttttagtgcctttgtagcgtacttcggtaaagaagtgggcgtccggcgtacgtgtctgcggtacgttagacccccaggcgatgatgtagctggagttataccagtcggcagattccggtacgtcggtttgctcgccccaggtcatcgggctggcgggcggcaggtcgcaataccagtcgtagaaacttaaacaggtgccgccaagcaggctcagataacgcgttccggcggcgtaagaaaccatgctcatcgccgggatcgggctgaaaccggcaacgcgatccgggccgtaggttttgatggtccagacgttagcggcggcaatcagctggtttagttcctgccagttggagcggataaacccgccgcgcccacgcacttgtttgtagctcaggcacttttgcggatcgttcataatgcttgcccacgccagtaccggatcgctgtgttgcttgagggcttcgcgccacagttcaatcagtcgtttacgaatgagcgggtatttcaggcggttagcgctgtaaagataccaggagtaacttgcgccacgcgggcagccgcgaggttcatgattgggcaggtcagggcgagtgcgcgggtagtcggtctgttggatttcccaggtcaccagaccatttttaacgtagattttccagctacaggagcctgtacagttaacaccgtgggtggaacgcacgattttgtcgaactgccaacgctggcgatagctgtcctcccagtcgcggttgctatgcatcacctgtccgtgaccatcggcaaaggtttcgcccttttgtttgaagtagcgaaagcgatccaaaagtttactcatgacatgactcctgctccaggaatgaattgggatctgatgccttgtcggatgcgacacggttgtacatcaggcatcgatctcttatttttggctgaacttccgccgaccataaaccagccaggtcagcagcacacaaacgatgtagaagattaaaaacactttcatcgcgccgaccggagagccggtcatattgaggctcatgccaaacgcctgcggaataaaaaagccgcccactgcgccaatggcactgataaagcccagagccgccgccgtttcggtgacggcttcttcatgagcttgctcatcactaccgcctttcatctttacccgataaatggttatctggcgaaagatgacggcgatcatctggaaagtagaaccacttcccagacccgcagtcagaaacagccccataaatacggcgtaaaaggcgatgaaattaccggagcctgtgcccggtaaggtaaggaacagcagggcactgaaaatcgccataaaaataaagttgatcaacgtcacccgcacgccgccgaacttatcggaaatagcaccaccaacgctccgcgcgatggcaccgataaatgggccaaagaacgccaggcgcagaatattcacatccgggaactgggtttttgccagcatggcaaaacccgcagaaaaaccgataaagctaccgaaggtggcaaggtaaagcaggctcagcagccagagatgcaggcgttgtaagacagggagctggtcggcaatactggcgcgactactggcgatatcattcatcccactccatgcggcgatcgtggcaatcgccagtagcggtacccaaatccatgcggcattcgccaggctcatcacgctaccgtcggcctgcggtacgccattgacgccgagaaaggcaaatacaggtacaaaaatgaccagcggtgcaaccagctgcattacacttacacctaagtttcctaatccgccattaatcccaagagcgctcccttgtttggcttttggaaagaagaaactgatattgcccatgctgctagcaaagtttgcacctgcaaaaccgcatagcaaagcgataacgataaatatcccaaaaggagtattcggattttgcacggcaattccgagccagacgcaaggaataatcaggattgcagtactaaaaaccgtccatcggcgtccaccgaatataggcaccataaaggagtagggaacacgcaataatgcgccagaaacggagggtaatgcggttaataaaaagagttgatcggtagtaaaattaaaaccgattttattgagattaacggtaactgcgctaaatagcatccagacacagaaggcaagaagtagacaactgacacttatccagagatttcttcgagcaatatgttttcctttattttcccagaaggccggattttctggtttccagtcgcgcaaaagataacgactatttttctcattttgcagtgccatattgttcctcacatgcacacattggtaatgaaaaaaagacaaaacacgaggtaaggcgcaatagccagttattagaattaaggatgaattgggtgaagtgctgattgaaagaatagataagaaagcgtaaccgcgggggcagaatggggattaagtagccagatatgtgttactaaatgtaactaacaagctaaccttcaaacggggttaatctttgaacgtatgtcatgtttcaacccttcagatcgtgaatctaaagggttacatattaactatattatcaacaagaccagacacttatagaattagtgatgatttattcattaaaaaggccaactactggaggaaaagcttctgtccagaaggtctatcggttcctctcttattgcctgattgtaataatcgttattacagtaagtattgtttatttcatctaaggtcatgtttttaacttttatattcatctggtttacaacttcctctgtcttgtaagtgtgtatattatatggggtatatgcttttttaataggatagtgaaacaattcgttatccacatctattccgtcagagtgaacttcaaatgcaccagggctaagaattgccaggccagtattaagcttaagtgctggggaaaacaaattaaataacatgagctgcatagtagggcaattgttcttcccagaaacatttaaaaaatttaagttttgctctgttttattatggggaataaagttccaatatcggatgtattattagtatcaatgtgggttattttattattgtccagtcttaaacttttgatagatggaagataagtcaggaaatcaagatttatatatttcaactggttgttagcagcgtttaatgtctgaacattgcagaagttgctatagaatattttaatttcagaaagcaaattgttgttaataagtaacgtattcaagttgggaaataagtcattgtgtaaacttgttagtttattatgggatagatccagcagtaagagttcatttttattacctgcaacaatatcagttaattgattatggctgagattcaggtattgcagccattcgcaagattctaattgcacaaactctagttgattatgtgccgcactaaaataagtaacactactaagcctatctatatcaatatttctgagagcattattattcatagatatatgtgtaatacttacatttctgccttgaggaaaatttatactctcaagagcattactattcagacttagctttacgagtctatcgtagttggttgcatcaaaatgtgtgaattggttattatcaagattgatagatgtgaagttttgcagccctggtggttgagtggttaaattaagtccacttaaatcaatggtcacttcattagtgtcatcaattatatttcttactgcagtccagtactgcatttgtgcaagtggatcattgttgatgccgttaactaatacatgccaaagatgtttactacttattagttgatcaatgtcattggttggcagtaaattgttattgcttaagtttaaatattccagttttgtagtgtttttggcgtttaaatgtgcaatatggttgtcgtttaaagtgattgttttcatcctgggatgattgtgtaatataaggtcagtgatcatattgtgatgggcacttaactcaatcagagattcttgccgcggctgccgttggcttcatcgttatagcctttaaaatcatattcccagtgaccaaaaccaatcatttgatcattgatttgcgtttctcctttaaagccgagacgggcataagttttatcaccatcgtcacgcttatcatcagtaaaataacgtagagcggtaaccttgccataaaggtcgagtttattaccatccttgttatagacttcggcagcgtgtgctacgttcgcagctaacaaaccagttacaaccaccgcaactatttttaatttcatttaacagaatccttttaattatcgttaaacgtattttctaaacgaattttaaacggcgtcatttataaatgacatactgtttttaaaatagaatggtgattaaaaacaatgagaaaaatagatgaaataatattatttatcgatatgtgatcgaagtcgaaatgagatataaggtgaattactggtatttgaaatttatttttttaatattgtcggaatttatctgattaactaccgggccgtagacccggcagttattttaaccacgacgtgtcgccagccagcagagcagggaaccgccgcagaccatcagcgcgccttgccagaagctgaagctcagcggggcgctgagcagcacggctgcaagcgcactggaaagtacaggcgtaaaatagctacctaccgccataatggtgacattgccatgcaatataccgacattccatgcagcataagcaaatcctaaggtaaatgccgcagagatgagtttaatcatgacgggcgtgctaaatatcatttctggttgtggcgtaagaaaatagtaaacccacagacttgctcccgttagcaggacaaaaacggtaattccattaaatccgcgtgcgtatttattcgttactgtgcaataggctgcccagataaacgcaccaatgaacgccaggaaataactcaatgggctggtggtgatattattgatgatttcatcataatgtaacccattgtcaccgcctaacacccaacagacgccgacgagggctaataataatccaggtacaatcaaccagttggttttctgaccattaaacagaatggcaaagagaattgtcaggctgggccacagatagttcaccatacccacttcaatcgcctgatgatgggtcgccgcataccctaaggaaagcgccagacagatttcatagctgacgaataacagactcccggcgagtaaatagcctttcgggatttgccgaatacgcggaaatccaaccgtgaagattaacagcagcccgcttaaactatagatagcagctgcgccgccgaccgggccgagcccctcactgacaccgcgaatcaatcctaccatcgtgctccacaggacgatcgctatcagccctatgagcgttgctttttgtcgtgtcatgctcgctgttttgtctctcttgccgttaaaaattaagctgaattttatagcatttttttaactggcctgtcaggcagtggtgcgtttttctaccgctattgaggtaggtcaatttgcgaaggcggattattttgtggcaaacagatgttctttttgatttcgcgcaaaaagattcagaattttactgttagtttcctcgcgcagtaatacccctgaaaaaagaggaaagcaatggacgtcagtcgcagacaattttttaaaatctgcgcgggcggtatggctggaacaacagtagcggcattgggctttgccccgaagcaagcactggctcaggcgcgaaactacaaattattacgcgctaaagagatccgtaacacctgcacatactgttccgtaggttgcgggctattgatgtatagcctgggtgatggcgcaaaaaacgccagagaagcgatttatcacattgaaggtgacccggatcatccggtaagccgtggtgcgctgtgcccgaaaggggccggtttgctggattacgtcaacagtgaaaaccgtctgcgctacccggaatatcgtgcgccaggttctgacaaatggcagcgcattagctgggaagaagcattctcccgtattgcgaagctgatgaaagctgaccgtgacgctaactttattgaaaagaacgagcagggcgtaacggtaaaccgttggctttctaccggtatgctgtgtgcctccggtgccagcaacgaaaccgggatgctgacccagaaatttgcccgctccctcgggatgctggcggtagacaaccaggcgcgcgtctgacacggaccaacggtagcaagtcttgctccaacatttggtcgcggtgcgatgaccaaccactgggtggatatcaaaaacgctaacgtcgtgatggtgatgggcggtaacgctgctgaagcgcatcccgtcggtttccgctgggcgatggaagcgaaaaacaacaacgacgcaaccttgatcgttgtcgatccccgttttacgcgtaccgcttctgtggcggatatttacgcgcctattcgttccggtacggacattacgttcctgtctggcgttttgcgctacctgatcgaaaacaacaaaatcaacgccgaatacgttaagcattacaccaacgccagcctgctggtgcgtgatgattttgctttcgaagacggtctgttcagcggctacgacgctgaaaaacgtcaatacgataaaagctcctggaactatcagctcgatgaaaacggctatgcgaaacgcgatgaaacactgactcatccgcgctgtgtgtggaacctgctgaaagagcacgtttcccgctacacgccggacgtcgttgaaaacatctgcggtacgccaaaagccgacttcctgaaagtgtgtgaagtgctggcctccaccagcgcaccggatcgcacaaccaccttcctgtacgcgctgggctggacgcagcacactgtgggtgcgcagaacatccgtactatggcgatgatccagttgctgctcggtaacatgggtatggccggtggcggcgtgaacgcattgcgtggtcactccaacattcagggcttgactgacttaggcctgctctctaccagcctgccaggttatctgacgctgccgagtgaaaaacaggttgatttgcagagctatctggaagcgaacacgccgaaagcgacgctggctgatcaggtgaactactggagcaactatccgaagttcttcgttagcctgatgaaatctttctatggcgatgccgcgcagaaagagaacaactggggctatgactggctgccgaagtgggaccagacctacgacgtcatcaagtatttcaacatgatggatgaaggcaaagtcaccggttatttctgccagggctttaacccggttgcgtccttcccggacaaaaacaaagtggtgagctgcctgagcaagctgaagtacatggtggttatcgatccgctggtgactgaaacctctaccttctggcagaaccacggtgagagcaacgatgtcgatccggcgtctattcagactgaagtattccgtctgcctagcacctgctttgctgaagaagatggttctatcgctaactccggtcgctggttgcagtggcactggaaaggtcaggacgcgccgggcgaagcgcgtaacgacggtgaaattctggcgggtatctaccatcatctgcgcgagctgtaccagtccgaaggtggtaaaggcgtagaaccgctgatgaagatgagctggaactacaagcagccgcacgaaccgcaatctgacgaagtggctaaagagaacaacggctacgcgctggaagatctctatgacgctaatggcgtgcttattgcgaagaaaggtcagttgctgagtagctttgcgcatctgcgtgatgacggtacaaccgcatcttcttgctggatctacaccggtagctggacagagcagggcaaccagatggctaaccgcgataactccgacccgtccggtctggggaatacgctgggatgggcctgggcgtggccgctcaaccgtcgcgtgctgtacaaccgtgctagcgcggatatcaacggtaaaccgtgggatccgaaacggatgctgatccagtggaacggcagcaagtggacgggtaacgatattcctgacttcggcaatgccgcaccgggtacgccaaccgggccgtttatcatgcagccggaagggatgggacgcctgtttgccatcaacaaaatggcggaaggtccgttcccggaacactacgagccgattgaaacgccgctgggcactaacccgctgcatccgaacgtggtgtctaacccggttgttcgtctgtatgaacaagacgcgctgcggatgggtaaaaaagagcagttcccgtatgtgggtacgacctatcgtctgaccgagcacttccacacctggaccaagcacgcattgctcaacgcaattgctcagccggaacagtttgtggaaatcagcgaaacgctggcggcggcgaaaggcattaataatggcgatcgtgtcactgtctccagcaagcgtggctttatccgcgcggtggctgtggtaacgcgtcgtctgaaaccgctgaatgtaaatggtcagcaggttgaaacggtgggtattccaatccactggggctttgagggtgtcgcgcgtaaaggttatatcgctaacactctgacgccgaatgtcggtgatgcaaacagccaaacgccggaatataaagcgttcttagtcaacatcgagaaggcgtaagggggcgaacagatggctatggaaacgcaggacattatcaaaaggtccgcaactaactccatcacgccgccttctcaggtgcgtgattacaaagcagaagtcgcaaaacttatcgacgtttccacctgtatcggctgtaaagcctgtcaggtggcgtgtagcgagtggaacgacatccgtgatgaagtggggcactgcgtcggggtttacgataaccccgccgatctgagcgccaagtcctggacggtgatgcgctttagcgaaaccgaacagaacggcaagctggagtggctgatccgtaaagacggctgtatgcactgtgaagatcccggctgcctgaaggcgtgcccgtctgctggtgcaatcattcagtacgctaacgggattgtcgatttccagagcgaaaactgcatcggctgtggttactgcattgccgggtgtccgtttaatattccgcgcctcaacaaagaggataaccgggtatataaatgcacgctctgcgtcgatcgcgtcagcgtcggccaggaaccggcttgtgtgaaaacctgtccgaccggggctatccacttcggcaccaagaaggagatgctggagctggcggaacagcgcgtggcgaaactgaaagcgcgtggttacgaacatgctggcgtctacaacccggaaggggtcggtggtacgcacgttatgtacgtgctgcatcacgccgatcagccggagctgtatcacggtctgccgaaagatccgaagatcgacaccagcgtaagcctgtggaaaggcgcgttgaaaccgctggcagcggctggctttattgccacttttgccgggttgattttccactacatcggtattggcccgaataaggaagtggacgatgacgaggaggatcatcatgagtaagagcaaaatgattgtgcgcaccaaatttattgatcgcgcctgtcactggaccgtggtgatttgcttcttcctggtggcgctgtccgggattagcttcttcttcccgacgctgcaatggctgacgcaaaccttcggtacgccgcagatgggacgcattttgcacccgttcttcggcattgcgattttcgtcgcactgatgtttatgtttgtgcgttttgtgcatcacaacatcccggataagaaagatattccgtggctgttgaacattgtcgaagtattgaaaggcaatgagcataaagtggcggatgtcggtaagtacaacgccgggcaaaagatgatgttctggagcatcatgagcatgattttcgtgctgctggtgaccggggtgattatctggcgtccgtactttgcgcagtacttcccgatgcaggttgttcgctacagcctgctgatccacgcggctgcgggtatcatcctgatccacgccatcctgatccatatgtatatggcattttgggtgaaaggaagcattaaagggatgatcgaagggaaggtaagtcgtcgctgggcgaagaaacaccatccgcgctggtatcgtgaaatcgagaaggcagaagcgaaaaaagagagtgaagaagggatataatctcttttgaactttaagctgaaaatggcgctgtaaaaggcgccattttcatattgtagacaacgtaggctttgttcatgccggatgcggcgtgaacgccttatccggcatgaaaacccttcaaatccaatagattgcagtgaacgtgtaggcctgataagcgtagcgcatcaggcaatgttgcgtttgtcatcagtttcaaatggcgctgtaaaaggcgtcattttcatattgtagacaacgtaggctttgttcatgccggatgcggcgtgaacgccttatccggcatgaaaacccttcaaatccaatagattgcagtgaacgtgtaggcctgataagcgtagcgcatcaggcaatgttgcgtttgtcatcagttctaaatggcgctttataaagtgccatttttttattgcgtaaccagacggcgtaatcggctcacatccactgttttttctgcctctgccagactccaggcgttttgcagattcagccacatttgcgggctactgccgatcaccacggaaagtttaatcgccatttctggcgtcaaagctgcttttcctgtcagcaatcggcttgccgtactgggagcaatttccattgctctggcaaactcgcgcagactgacattaagttcgtccagactttcctgaataatgtcccccgggcggggatgattggccattttcattagtgtctttactctcagtagcgttccttcactgggaacactatcattattgttccttcctacgcaacaataatccatttagccatttcatgttggagagtgtgcgatgctgcgacccgaacatggcagtcgcagcaaaggcctcttagtgacggaaatcaatcaccatgcggccacggattttgccttcttccatctcagtaaagatggtgttgatgtccgctaacggacgcagggcgactttcggcaccactttaccttcggcggcaaactggaaggcttcagttaaatcctggcgcgtgccgaccaggctaccgaccacttcaataccatccagcacaagacgtgggatatccaggctcatagactccggcggtagaccgacagccacaacacgaccgcctgcacggacagcatcaactgcgctgttaaacgcagctttagctaccgctgttaccaccgcagcgtgagcgccaccagttttctcctgcacaattttggcggcgtcttcggtgtgactgttaatcgctaaatctgcgcccatttcggttgccagttttaactgctcatcattgacatcaatggcgatcactttggcgttaaagacattcttcgcgtattgcagggcgaggttacccagaccgccaagaccgtagatagcaatccactgccctggacgaattttactcagcttaacggctttgtaggtggtgactcccgcacaggtaatgctgctggccgccgcgctgtccagaccatctggcacttttaccgcgtaatcggcgaccacgatgcactcttccgccatcccgccatcaacgctgtatccggcatttttaacactacggcagagcgtttcgttaccactgttacagtattcgcaatgaccgcatccttcgtagaaccacgccacgctggcacgatcgcctggttttaaactggtgacacctggacccacttctgccaccacaccgatgccttcatggcccagaattacgccggttttgtcaccaaaatcgccattcttaacatgaagatcggtatgacatacaccacaacactccattttcagcagggcttcgccatgtttcagactgcgcagtgttttatacgtaacgtcaacatgatgatccttcgtaacaactgcagccttcatagttcctccttttcggatgatgttctgcatagcaggtgaggcaaatgagatttattcgccactacccagtatggatgagatctgaaaaagggagagggaaatagcccggtagccttcactaccgggcgcaggcttagatggaggtacggcggtagtcgcggtattcggcttgccagaaattatcgtcaatggcctgttgcagggcttcggcagaggttttcaccgccacgccttgctgctgcgccattttgccaaccgcaaacgcaattgcgcgggagactttctgaatatctttcagttccggcagtaccataccttcgccgttcagcaccaatggactatactgcgccagcgtttcacttgcgctcatcagcatctcatcggtgatacgactcgcgccggaagcaataacacccaggccgatgcccgggaaaataaaggcgttgttacactgggcgatagggtagattttatctttccataccactggattaaacgggctgcccgtggcgaccagcgcgttaccttcggtccaggcgataatgtcctgcggtgtggcttccacgcgactcgtcgggttagacagcggcatcacgatcggacgcggacagtgtttatgcatctcacggatgatctcttccgtaaacagcccggtctgtccactgacgccaatcagaatatctggttttacattgcgcaccacatccagcagactcagcacatcgctgtcggtatcccagtcactgaggttttcgcgcttctgcaccagtttggtctggaaaggcagcaggttcggcatcttgtcagtcagcaagccaaagcgatcgaccataaagactttctgccgcgccgcttcctcgcttaatccttcgcgctgggtctgggagatgatcatttcggcaatgccgcatcccgcactacctgcgccaaggaagacgatttttttctcgcttaactgaccacctgccgcgcggcttgctgcgatcagtgtgccgactgttaccgccgcagtgccctgaatgtcatcgttaaaagaacaaatttcattgcgatagcggttaagtaacggcatcgcatttttttgagcaaagtcttcaaactgcaacagcacgtctggccagcgttgtttcacagcctggataaattcatcaacgaattcatagtattcgtcgtcagtgatacgcggattacgccagcccatatacagcggatcgttaagcagctgttggttgttcgttccgacatccagcaccaccggaagggtatacgccgggctgatgccgccacaggcggtatagaggctcagtttaccgatcggaatgcccatcccgccgatgccctggtcaccaagccccagaatgcgttcaccgtcagtcaccacaatcactttaatattatggttcggcacgttttgcagaatatcgtccatattgtgccggttctggtaagagataaacacgccgcgactacggcggtagatctcagaaaaacgctcacaggctgcgccgacggttggggtataaataacaggcatcatctcatcaagatgattgtttaccagacggtagaagagggtttcgttagtgtcctggatgttacgcaggtagatgtgtttgtcgatttcggttttgaatccctgatactggatccatgctcgttccgcttgttcttcgatggtttcgaccacttccggcagtaaccccagcaggttgaagttacggcgttcttccatgctgaaggcactgcctttattcaacaacggaaattccagcagtacagggccagcgtaagggatataaaggctacgctgtttttttgtttttggttccatgtcactcactcttttttgaatatccatccctggggggcttttatcgtctttgctttaccgccagggcgtcggcctcaagtataaagcagataaaaacaaaaacaccattgcgcaggcaatggtgtttaatcgtcattgaggactgatggttatgaattacttttcagcggggcgttttctgccggttgggttatttactacgctggatttgtcaccttcggtaactattttgcgctggttagaaattttatggtccagtccaagaatatgacgtgcctgacggttgcttttcattttaactcctcaatcctgtagctagttttaaggacaacatcgccgtagcgaagaaacacgtgctaaacccctaaattaggttgccgatcaagcatagcaccttaaagcgtagggtgctggccactgaccacataattgatcgtttgctggtagatatcactgaggatgtcgttatcagaagcttcaacccatttggtcagctccatgagaatgtcatcttcagtgacaacaccatgctgtgcccgaaggccttgctcaatggcattaaccagagcgggttctgctgtactattttctgcctgataataagtaaacatagtgattctccgtgtctgtgtatttatggtgtctgctacggatcgcagatttataaagcacattcagcatggcaaatatttgccgcttcgttgttaagattagtcctggttgatgatttttatattttaacaccatgatattcatagggattgtgattggtatgatccgattaatattgatacaatatcttttgggttatatattcccggtaatctattgtgggaatttaatttaagtgcagaagtaatattttcgccggattttattcggaatatcctgcttatcctcgtgctgtttctcacgtagtctataatttcctttttaagcccacaggagagcaacaatgacaatccataagaaaggtcaggcacactgggaaggcgatatcaaacgcgggaagggaacagtatccaccgagagtggcgtgctgaaccaacagccgtatggatttaacacgcgttttgaaggcgaaaaaggaaccaaccctgaagaactgattggcgcagcgcatgccgcatgtttcagtatggcgcttagtttaatgctgggggaagcgggattcacgccaacaagcattgataccaccgccgatgtgagcctggataaagtggatgccggttttgcgattacgaaaatcgcactgaagagtgaagttgcggtgccgggtattgatgcctctacctttgacggcataatccagaaagcaaaagcaggatgcccggtctctcaggtactgaaagcggaaattacgctggattaccagttgaaaagctaaagcattgccggatgacgcgtcaggcgcgtgaatgcctgatgcgttgttagcatctttacagcgcccgccagcaccggagctcacgtccgtcctcccttattgctaaactttgccggacttcacatccgtgggttgccagcgggcaacgttcgtagaaaaaacagccttgcggcaacgtgcggtttcccggcagatccgttttacgtaatgcccattcttcctccagcggtttatcaatggcggggagggaatccagcaataatcgggtgtatggatgtgcaggtgccgtcagcacctgctgcgcgtcgcccagttctacaatctgcccgagatacatcaccgccacccgatcgctcatatgacgtatcacgctgacattgtgactaatcagcacataggtcagcccgtgattttcctgtagcgttaccagtaaattgaggatctgcgcctgaacggagatatccagcgcagaggttggctcatcaagcacaatcacgtcaggctggctagagagtgctctggcaatggcgatacgttgccgctgcccgccggagaacgcatgaggcaggcggtcgagatactccggacgaatacccacctgcacagccaactcctctgccaacgctcgccgctgttgttcactactacgcttagctatccagagcggttctgtgatgatgcgccacaccggtaagcgcggattaaggctagagagcgggtcctgaaacaccatctgcataatgcgttgactgccagaacggatgtactgcccgtggctcggttgcagcatacccattaaaagctgtgcgagggtgcttttgccgcagccactctcgccgacgatccctaaggtttcaccacggcggatctgtaaatcaataccattaatggcatgaacatgttccgtagttttaccaagccagtttttacgggccgggaaattgatatggacgtcgcgtaacgttaataacgtgtcagacacttataacctcctgctgcggataccaacaggcacagcgctggttgttgtcaccacacgctgtcagcgccgggacgttttcacactgtgcacctgccgcatagcaacgatcgcgaaaagcgcagccgtcaggcaaatgggtgaggtttggtaccgtccctggaatggcgggtaatagctggcgtggtactccatgttctggtgcgcattgcagcaaaccaatggtatacggatgccggggatgatggataacgtctgccgtcacgccgctttcaattacgcttccggcatacatcacgtaaacgctatcgcacagttggctcaccacggccatatcatggctgatgaacagaaccgcagttccactggcgcgggctttatgtttaagcaaacgcagtacctgcaactgcaccgtgacgtccagcgccgtagtcggttcgtcggcaataatcaattgcggctcgcaggagaatgccagcgcaatcattacccgctggcgcataccaccactaagctcaaacggatagcggctcataacttccacggcatccgggatttgcatctcttccagcaggtcaatcgctttagctctggcttcccgacgacttattggttgatgatggcggatcacgtccatcatctgaagacctattcgacgtgtcggattgaggtcggtcatcggttcctgaaagatcatcgccactcgtgcgccgcgccactgacgaagctgtttttcccgcgcgttaagaacatcttctcccagcagggaaatctgcccccgatgtacgcaataactgcccgtcggtagcagacgcataatcagcattgcggtgacacttttaccactgccggattctcccaccagaccgacaatttcaccgcggttaatctgcaaggacacattgttgagcgcgtgaacatcaccgttaaaaccggggaaactcaaatgcagttgttgaatgtccagaacgggttgggtcatgactgctttcctcctgctttttagttcaactctgctttcctcctgctttcgggtcaagcagatcgcgaataccatcaccaaagagattaaacccgacggcggtaagcaaaatcgctgcccccggaaatgcgcaataccaccactgatcgagtacatagttgcgaccatttgctaccatcgcgccccattcagcactcggttgttgagcacccaggccaataaatcccaacgtggcggccattaaaatcgcgctaccgatatccaggcttgcctgcacgatcagcggcggtagggagttacgtaaaatatgccagttgatcagatgccaacgagacgcgccaaaggttttcgccgcctgaacataggtatactggcgtacaactaatgcttgcccccgcgccaggcgcacataaaagggaattcgcacaatagcaatagccagcatggcgttaaacaaactcggcccgagagcggcagccagtgccattgtcagtaccaagctaggaatgctcagcataatgtccatgatgcgcatgatgatggcgtctgcgcgtccaccaagcacaccggatagacatccgagtaggctaccaatcatacccgcaatggcaaccacgactaatccggcgagaatactttgctgactgccgaccagtacgcggctaaacagatcgcgtcccacttcatcggtgccaaaccagtgcgccgcagaaggcggcaaaaggcgggcggttaaatcaatggcgttgggatcatgcgtcgccagccacggactaaaaatcatcatcaatagcattaatacaatgatgactgcgctggtcacggtgagcggactgcctttcagcatccataccagttttgcaccgttaaatcgcgtttgtttttgtgggcgtacggcggacgtttcctcgcttagcatcattcaccacctccacgtccgatacgcggatcaatccacaaatagagcaaatccaccaccaggttgaccagcacataagcaaaactaaccacgacggcaaagcccatcactgccgggaagtcgagcgcctgtatacttgttactacccatgcacccattccgggccaggcaaaaacggtttcggtgagcactgcgccatacaacaaatcgcccagcgccaaacccaatacggtaatgcttgggatcaacgcattgggtagcgcataacataaaacgatataccagccgggcaagccgctggcccgggcggtacgaatgtagtcttcactcaattgttccagcatcgcactgcggatctggcgagcgacaattcccaggtgaacgaacgccagcgttaatgccggtaagatgagatgttgcaacgcattgaagaagacttcaccgttgccttcaagcagcgcatcgagcagataaaagccggtaacgtgcgttggtggatccagccagtcatcaagccttccgccgccgggaagaatttgcagatgaccataaaacagcacaatgacgcccagcccaagccagaacgcaggtgtggagattccggtaatggccattattcgcaccagatgatccagccagcgatttcgccagactgcagagagtatgcccagcgggatgccaatcaggagtgccagcagcagggcaccaaaagccagctccagcgtcgccgggaaaaatatacgcaactcttccagcaccggacgcccggtacgaatggatgttcccaggtcaccatgaaacaggtcgctgacgtagcggtaaaactgtacatacagtggctggtccagtcccagttgctggcgaatattttccacgatagcatcgctggcgcggtcacccgccagtaaccgcgccggatcaccagggatcagatggctgataataaacgtaatcacgcagacgcccgccaccacgagcaccagcccccagcagcgttggcgtaaaatactccagaaggtcacgttatttactcatggtattgatattgaagacctgttccagcatgggattgaacacaaagcctttcacctctttgttcatcgccagttggtagtttttctggaacaggtacacataagcagcgtcatcaatgacgattttctgtgcctgctggtagtcccgggtacgctgcgtctggtcggtggtcgcaagcgcattgcgcagtaacttatcgacctcactgttttcatagaagctgcggttacccggcagaccttttttgtcactctcaaaccagtaattcataaacatatacgggtcggcaaaatccggactccagttgccaatcgcaatgtcgtaatcacctttacccactctgtcgcgcatggtggcgttcgccagcttttccagcttcacaatgatgcccagcttgttgagactggattgtgtcgccagagcaataggctcccagttcggatcgttatcggagtagagaaacgtcaggctggtgggtttgctcgtcactttatcccattcggctttggctttcgtttcgtcatggttgtattgcattgccgtcgcatcgtagccccacatgccttccggaatcgggccgcgcatctgttttccgttaccactcagaatgccgttaaccatgccctgataatcggtagaccaggaaatggcccgacgcagatccgcctgattaagaggcgctttgctgttattcagatacagataggtaacgcgcagactcggatactctgccacattgactttattttcctgcttcagggcgttgagttgatccaccggcagcgcatcggcaatgtcaatgtcgccacgggagagctgcaggcgacgggaggcactttcaccaataatttttacgcttacccgtttgaagttcggtttattgcctgggtaatgcggatttggcaccagaactaattgctgacctttttgccagcttttcagcataaatggtccggaaccggcggtattttgcgcgaggaagccgcgagcatcatccgctgcatgttcctttaagaccgccggattgataatggatgcaccgtcattcgccagcgtgtagaggaacggtgcgaatggttggctaagggtaaacttcaccgtatgttcgtcgggagcatcaatctttaaatctttgggaaatgcttctgctggcccctggccgatttttagtagccgctcaaaagaaagttttactgcttcggcagtgacaggtgtgccatcggcaaatttagcattatctttcagggtgaacgtccactctttttgatcgtcagacgctttccagctacttgccagatcgccttcaacgtcggtactgcctttatcaccgtccgttttgtactgaaccagccgctgataagacgggtaggtcactgtccagtcgttattatctattgttaccgccgggtcgagggtttgtggatcggcggccttaccaatcaccagcatatcttttggtacggcggcgtgcgcaaccgggaaatttgtggcaaggacgagcgcgagcaatgtgggacgaaagcttatgcttctcttcatgacagtttcctgattaactgacgtgctgtgtgccaggggatataaaacaagagaattgatcagcgagcagagggtaactcgctgcctggggtaattcgaagtgccaccattcgctggagataccgacaaaaccgccaccagtcattatcgcattcagcaacagccgattgcgctgagcggcgggcgggacggaagggtgataggcatgggagcgctcgtgcatttcatcgaaccctgcgcccatatcgaggatgttcccgtgctcatcacgaagcgtcaggtcgatcgccgtgccacggctgtgattagaaccgaccgtcacatcaacaacatattgcgggtctgggcaggcttgccacaacatcgcctgtgcttgttgtgggcgatacgcatcgtaaatcaccagttgtaacccactcagctgggcgatgctgatacttttcgccagcgcggtaatcgcatccttgtgtaacagacaacgcgcttgctgataaatagctttacctgtgatgttatcagcgcaggcgtatttcaattcgatctccagatcagggaagattacggctaaatcaaccagttcggtggtatcgctcataaacggttcctgtataagacaaaaattgctgcgctttccgcttatgcagatctcatgccatgccgggataagcgccagaatgctggcttaaagttatattttttaacttttgatcaacatttgtgcagcgtagtgcagttttggtgcaagaggggaagttaaggaaggaatctcccggaatcgtagctgaaatcacagtatttaagtgacagtgtcacgttaaatgaaaacccgcgagtgcgggcgagaggaatttgtcagattttcagcggtaacacgctgctcatccagcctggaatttcttcggcgggtagggggcgggaaaagaaatatccctgaataacgcgacagtggatcttgcgtagcatctcaaattgctctttggtttcgacgccttccgccacgacggttaaattgaggctttgcccaatgctggtaatggcttcaagtaaggcaaggatgcgtttttcggtcagacaacgatcgacaaaacttttgtcaattttgatttccgttaccggaagactgactaagcgggataatccggaaaagcccgtaccaaaatcatctacgcttaagcccacgcccatatcacgcaggatctgaatgcgcttaaagatttcggtatcgtgttccatcatcatgctttccgtgatttctaccgtcagctggtggccgtcaataccccaggcgtgcattgcatcagacacctgattaggcagttgattactgcgaaagtgcagcgcgctcaagttcacggataacgccgggatatgaatattctggctacgccattctgctaactgacggcaagcttccgcgatgacccagcgcccaatattttcgatttcaccaatctcttctgcgagaggaataaaccgactagggggcacatgaccatgcaggggatcgtgccagcgagcaagggcttcgatgccgtacagttcacccgtttctgcgaagatttgcggctggtaaaccagtttcagttggttattgctaatcgcttctttcagcgctgcgcctaaaaccaaacgctcttttaccatttcgttcatcgccgggctgaagaactgccagccgttaccgccattcttgcgaatataatccattgcattgtgagcagtggagagcaagtaatcgcggtttttacccaggtcgtagctgatgccaatactcaaggtaagcgggaagggtttatcgtcaatcattatcggcttgctgaccacattccgtagctcatcggcgatttgggtaatgttactgacgtcgttttcgaggctcacgaggacaaactgcgtaccttcgatacgacagagatactgatccggtttgagtttttcacgaaagcgattgaccacttccagcaatgcctgatcggcccacgcatagccaaggctatcaatcacatcctgaatatggtcaacaccgatgagatacaccacgggagagacggctttgtcgaccaggtcatcgaggtaattgtgcaggttattgcgatttggcagaccggtcatcggatcaaattggatgagttgttcaatatgctgacggcttttttcctgttccagcgccagcgcggccatatgctggctgatatctgccacgcgttcgataaaggcgctggtttctgctccactgctggttttaatttgcaggatccccgcaggcgcgccatcacgctgacgaatggtcgcactccagctttgcgcattttgaatttctgcaccgtgggaagaactcgcccagtgtatcggcatcccgttgcgcagtgcgaacaggctaacatggctttcgttgagtacagattcgatgttacgacaaatgatttcccccatttcatgaaatggcgggctgctgcacatggcggcgagaatattgccttcaagctggcgaatctgccgttcttcggtgatatcgctgaaagtcattaccaggttctgcagatgcgcgagcacgtcataaaccgggctgatagaggctttaatccagattttttcaccggtgcgcgtcaacagcagaaattcgtcctgatcgcgggcggttttccatagcaactgttgtaaacgaatgcggttatcggcagggaattcaggaatgttcaggagtgtatcgggctgcataccgctggcttcgctaatgcagtaaccaaacatttcggtaaatgcgcgattgcactgcacaatatggcgttccggatcgaggacaatcaccggtcggtcgagatggtcaacggcaataatcaattgtcgggtctgttctttttgcgccatttctacgctggcatcccgtaccagcgccaggtaataaactttcccctcggcgctcactttgcttagcgcaaaacgggtccagattttactgccgtcttttttctccagctgcagctcccgactcatcccctcaacacgcgctttaccgccttcacggttgtgacgaatgtattcaggatgcgcaggacgcaaatcccgcggaatcagcatatcaatgttattgccaatgacttcttcacgtttgtatccccagagcttctctgcggcggggttgaaaaacatcacttcatcattttcgttaattaacaccgcacccatcatattttgctcaagggcggggaaaaaaatgccatcggcggcattatccgcatcggttagcttcatgattacctctgcatcctggcgcatttaaagactggctttccagagttcaacacggtttctacctcgtcttttggcgatatacagagcttcatcggctatttgaatgaggcgctcatagtcaggatgaccattaaacatggcggcaccgatggaaagactgagggcaatatcttcgccgtttgcggctttcagtttggttttctccacccgactgcgaatacgttctgcggtacgtaacgtttcgttttcagaagcttcagtcaaaacaatgataaattcatcgcccccgtagcggaaaacataatcactactgcggacgttgtcataaaaggcctgagagactttacgcagaatttcatcaccagtgttatggccccacgtatcgttgatctctttgaatttatcaacgtcaataatcagcacactcagcggtgtaccggtccggttggcatgggcaatttcgcgtttgaagatagtcggtaggaaacggcggttaagtaatttcgtcagtacatccataccgacttcgtggcggcttacttcttcaaacaattcacgcagcaaggtaataatttggcttacggtatttcttatctgtaataaaaatttcacccgcagacttctgttattcaaatttctggtgttacgcatggtttgattgaaaataccgtcgaaatcctgaatcagacgggagatatggcctacttcggcaataccactaaaataatgtcgacctttatggttaaaccacaggccaaaatcagcctggcttaaaggcaaactactgcctaaatcagaatccagcaggattttatagataatatctatttcccaactaagtatactggctatttgccgttctttttcttcttcggcgttttccagtaagctgaagatacgatagttttcatcttccttactggcactactgtcactaaaggtaaacgcgcgagtcatcacttccatcgcgatatcaatactgttaatgctgaaatggtagacctgaagtttttctgcggcggaataatcgctagagaagatcaccggatagaggatttttttcagcacccgaaaccccatctcgacaatttctaccggaattcctatgcgggcatgcacttccgcgacggtatgctggatttgtattagcctttcgacatcgtcaacctgggcagaaagcacgttaataatccagcgttccatcgcactcttcaactgccgctcaacttgttcattactcaagaattcttcggcatgcgggtcgatgcggacaattcgataaaactcgatactcagataatgagcatgcgcaacggcaatttccgcggctttagcacgaatgggcggatctgcctgttcgacaagtccggtccactcatctttcattcttttaaaatacatctccataattcacacccttataaggctgggaaatcagacggaatcaaaatgaaacgcaacgtgcgagatcgactaactgcaccatattctcctgaaatatgaagatatactgaaaagaaataagcgatttaggacagtttcaatctacgctactgttcttcagaagagtatagcccatcgtaattatttttcggtgacagcgaatatcgtatggtttttcatattcatacatttttattagggatttatggctgtttaactaagtgtggttaatttgacttaagtaagcatgattattagtgggatagtttaagagggtaacaagccggtgggtaaagcaccggcttgttacaaagtaagaatgggagtttaactgccccagcgactttgcagatagctgaccgcttgttgagtctgcggtttattcagatagtcctcacggaacaagatggtgccgctaatttcgggcacagcatcgttaagatcgagctgctttttcagttccggtacgccgccgttaatcatccagtctggctctatcttactaggttcacccactttatagaaggcgataccgatatacaggcgggtcctggtcggtttaacgacatccgcccaccattttgccaacacgtcataacgcgcggcactccgactgaacggccagtaaatttggggagcaatgtaatccagcaatccttgttccacccatcgacgggtgtcagcgtaggattcgtcataggctgccgcgcctcgggtatcggaaccgagcggatcgtgacttcggttacgccacacgcctgccgggctaacaccaaattcgactcccggcttaatgcttttaatggtgtggcttacctttgcaattaactgctgagtattgttgcgccgccagtctgctttactcgcaaatgcgcctccgtatttacggtacgtttcgttatcatttagccgactacccggactctccgtatagaaatagtcgtcaaactgcacgccatctacgggatagcgggaaaccacttctgcgactatacttgtgatccagtcctgaacctcagggatgcccgggtcgaggacaaagcgatcgccagacgttctgatccagtcgcggtgttgcacatagacgctcgccggttgttgagacagagtgctattcagttccctgatagtaccgggcttcgtattaacgcttacgcgataggggttaaaccaggcgtgtactttcatcccacgcttgtgggcttcgtcgagcataaattgcagcggatcgtaacccggattttcaccaatcttaccggtcataagatcggaccacggcaaaattttgcttggccacagggcggtaccgtccggcttgacctggaaaaagaccgtgtttatgccgagacgttgcagatgatccagtttgtcgatcatcgcctgttgttgtacacgggcccggctggtggggttactaatgttaacgctggaaaccggtggccagtcgagccgagaaaccgtggccagccagatgccacgcatcggttgactgctttgttgcgtcgtggctggtggcttactacctgctggtggtgtcaccatggactctggaggcgtgcttttacaactacacagtaaaagtgccagtgcaactagtatcgctggtcttctaatcgttaatttcttgtttcgggagcagatatccatatgtgctggtttccggtaaacagatgtgcgctcattctcgtacttatccccgttaagtcaatacgacagcaagcacgaaaaagggagcgatgaattatcgctcccttgtcttataaccattcagacatggttagtgtttcttgtcattcatcacaatatagtgtggactacgtgcacgcgggtgcagggagaagtgaccttttggtgcgttctgactgttgattggctccagagtgacgccggtatttgctttgcctttacgatcatgaacagcatagagaataaagggcagggcaagtaccaccaggaaactaacaaccagtaattcaacatacatatcggtagaatcaccctggatgttatccggcggcaggaaggaaacaataaacgccataatactagtcagcagaccgacaattgccacgaccagtttcacccctttaccaccagggatattaaatgtgcgttttaagtcaggatgtttaagaaccaacacaatgtagccaataaacagcatgaaataagcacacagataaatcaccaccgtcagcgccagtgcgatcaggaaggacatgttgttaccgccaccggtattggtgaggatgatcaacgcgatagacgtaatcaccagctggctaatgaccagcgttaccggtacgccatttttgttcattttagcgaatgccgctggcagcaggtttttctgcgctgttacatacatcccgcgagaaggaccaacaatccaggaggcgatttccgccagaacacccagcaacagcagtgcggagatcacgcgaaccgtccactcaatttctggtgccacatgggacatcagaacggtaaaggtttgcattacccctgcggagaggttgatttcattacccggaatgaccatcgcaatagacaaaccaccaacagagcttaagcagattgccgccaccatcagcagtaacatagccaacggatagtcgcgccctgggttgctcatttcattgacgtgggttgcggatgcttctacgcccatataactcaaaatgaaggcaacaaatactaccagggtgcccactttagagaagtcagggaagaaggtcttgctatccatttcgatagcaacgggggcaccggagtgcagataaatagccgctaatgcgatcaaaataaatgcaggtaacaggataccggcgaagaagccaactttagcaattcgcgccgtgtatttcgtgccaccaaactgcgttaatgccagcgcccaaagaatgatgagtgctgcaatagttttggtaatggggtcttcattcagcgctggccatttcaggatgtaggagagtgcccctaacacgaaatagagcatcggaataaaaccaatggcgatttgcagatagccaaaactgatcgctgcaaatccccatctcggccccagagtattacttacccaggcgaagacaccaccttcttcccagccgtcgacggtggccatttccgcagcacaaagtcccacgggaataaaccataaaatcccgcctaatagcaggaagaagactaaactaaagccgcttgttgcgaaggtagggtattcataaacagccattaccatgcttgccgttatggcaaagaatccaagtaatgtgagctgcttagctttacctgtctgtacacttgtagccatattatccccctaaaacggtattcctgtcggaaccgcacctgttttgttctgaagcgtattcagaacaatattttccgttgctaatgccagtgaacagactttggaaattgtcccgaaacgggttcgtttcgggacaccgttaccgttaaacgttatcaggtatgtttaaagctgttctgttgggcaataccctgcagtttcgggtgatcgctgagatatttcagggaggctttgtagtcttccagcaacagttcagcaaagtccatttcgaagccgcgacgacacataatgcgcatcaccacgatgtcggtggcttcaccgccgagagtgaaggccggaacctgccagccgcgcagacgcagacgttcagagaggtcatacagggtgtatcccggatcttcaccatctttcagtttgaagcaaaccgccgggatgccttcgtccgggcgacccgtacagatgaactcatacggccccagtttggcgatttcatccgccagataagcggcaacctggtaagaggcgttctgtactttggtatagccttcacgaccgaggcgcaggaattcatagtactgtgcaattacctgacccgccgggcgggagaagttgatggcaaaagtaccaatttgaccacccaggtagtcaacgttgaacaccagttcctgcggcagcgcttcttcgtcacgccagataacccagccgcagcccagcggagccagaccgaatttatggccactagcactgatgcttttcacacgcggcaggcggaagtcccagacgatatccggggcgacgaacggtgccaggaagccaccgctggcagcgtcgatgtgcatgtcgatgtcgataccggtatcggcctggaatttatccagcgcatcgtgcagcggttgtgggaactcatagttaccagtgtaggtcacgccgaaagtcggcaccacgccgatggtgttttcgtcacaggcttcaatcatgcgtttcgggtccataaacaactgaccggggcgcatagggatctcacgcagctccacatcccagtagcgggcgaatttatgccagcagatttgtaccggaccgcacaccaggtttggtttatccgttggtttgcctgcagcttccatacgcttgcgccaacgccatctcatcgccatcccgccgagcatacaggcctcggaagaaccaatggtgttggtgccaacggcctgaccatttttcggcgcaggcgcatgccacagatcggcaaccatatttacgcaacgcaggtcgatggctgcggattgcggatattcttctttgtcgatccagtttttgttaatggataaatccatcaatttgtggacattttcgtcgtcccaggtctggcagaaagtggccaggttctgacgagcgttgccatcaagatataattcgtcattgataatctggaatgcgacatcgtcgcgcatttcgtgcagcggaaaacgtttactttctgcgatagtggaaatagacttcgcaccaaaacgactatcgagtagttcgctccttaaatccgttacttgcttcttatccattttaaactccttaaaatgattggatcgcattaaaaaagtaggatttatcgataaagtaagcaagtgcaaaggactcgtgtttaaataacaaaatcctaatgttatttatcgtgagatattacgcgaataatattttttcattgaaaaacaatacaatatgaaattcttgggtggtggtaaggtgttttatgctgttatttttatgcgcattctgtgtctcctgaattatcacgtaaaaatcagaccttaaaatatcactattagtacttgattattattttgaacgcatttataaaattattacataaaaatagcgaatattgctaaaatccccgccaacgatgtgttgacggggctgttattattttggcaataatactccggtataagtatttaccggatgagaaagatattgtttaacggcagtgttaacattctctaccgtcatttgtttcaacaattgctcctgctcagtccatgctgcaggatcgtcatattgaataagactatttacaatagtgttcgctaattgttgaacgctacgctgttggatatcgaggctgcgctgaacgttttgctggtattcattcagttcttgctcactgatccctttagccagacgcttaaccatcacttcattcgctaacgttaacagttcatcatgtcgttctggttgacaagtaaaagccagcaaatgactgatatctttggcctgaggatcaacgctgaggcgagaagaaacgctgtatgctccagatgcctgttcacgaatattaacacgtagatcttttgccagtgcgacgttaaaagcatcgagcgccatacgcgtcggcagattaacaggtgtccgggaatcataacgcttccactgactaacctgtgccacaggttcattttgttcttttacagtaacgcttgcgttgtccgtcgcgcgagttaatggtttacctgcggctaatgggctatcagagtgtttgatacttcctaagtaacgcgtaattaacgccacgagtttgtcttctgcgacattaccgacaatgacaaacgtgatatccgctggagaactaaacaattggcgatcggcagccagcgcatctgcggcagtaaactgtgcaatctgattttcttgcagtaatttcgtgcggtcatcagcatagcgcgtctcatacatctgctgggcgaatttctccgctggacgctggtcgagcgttttcaacgcctgaatttgagcattttgtaggcttgcccaaatattatcgttaatcgtgctgtgggtgattcgctggttaatcaactgaaaaccaggttcagggttattagtccgcgcgctaacggagagcaacgtattcatgccactgactttactgctcatggttacgctattttccgcactccagcgtttcaggctggaagaggagagttcgccaacgccgcttccgctaactgctttatttgccagcgcgataagacttttttgctgcgcagggaaacttaaatcgcctttattgcttacggcaataatttgtagcttttgctcttcacccgcggattttgccagaataaccctggcaccattggaaagtgttaaacttgtcagattctccgccagcgtttctttgctgctaatttccgcctgtgggtctgcgtctactgttaagcttaaatttctgcctgggaagacgtaagccgccagctttttgttggcgtactccttttccagcgccaggatagccgcaggagacaatgcttttttggcggcaacctcattgtttaccatttgctcccaaaatgcgtcctggttctttcttaactgctgccatttttccgccagactttgcacggtaatttgctgccacagacgtttgctaagttgatatgtctcttccgggctcaagaacggcgtattatttaaactgctggatgccaggcgactggtcagcatacgtaaatcacgttcagcttgctgatcaaccgcatttttcagccaggtgaggcgggtagatttgacatcatcgagttcttcagcagaaaaaccatgctgatcaatggttgccaactctgccattaatgcattcgcagcatcctgcatattatcgtctcgtgcatttacacggaaaaacaggctctgataatcgggtgcaattttaacgctgcgcgcagtgccgccagaaatagtcttcaactcgccgctctgtatgcgttcctgcagacgttgattgaacagctgaactaacatgctccattcagcttgttcgataaagctttgctcatcgttcacttgtaccattggcaggcgataatagagtgcgatgccgttcacccggttttctttatcattaatgatattaaagcgcaggtggttttcggcttttgtcggccagacgcgattttcagctgctttgttagccggaagcttacttaaattatcctttatcagcgccagcgcttctttactgtcgatatcgccgaccacgataaaggtcatattatttggttgataccagcgttgataaaattggcgcaattgtgccggtgtgaccgtggcgacagtatccatcaggccgataggttcacggtctaaattacgggtatttgccagcaggaaagggcggcgcgcctgagaggtgcgccatttcgcatcctgatgggcacgccattcctcagtaattacgccacgttcagcgtctacttcgagtttttcaaaggttgcggcattactccattcactgaagattgccatcacttgttgcagattttgtttctgcgtagtcggcaaactcacctgatacaccgtttcgtcatagctggtataggcattaacatcgcgaccaaaacgcaggcccatactctcaaatgtttcgatgactttattacccggccatgtttttgtgccgttaaacatcatatgttctacaaaatgagccacgccgagctcattgtcttcttcctgcaaactaccggtatgaatttgcagccataaatttacctgatcctttggatgagcatgcggataaatcatatatcgcaagccattgtccagttgcccggtaattaacttttcatcctgcggtaaggcggcggcaatcagccgcccggggagcaacagagttgccactaacgtcagtaagaaacagaggtttctcataattatctccatgcgaaaaccgggcgaatttacccggttaagtaaaatccgaactattaaaatttcatgctgacatcaagccagaaagtacggccactggcgtaggtcgccacaccggtgttcgttgtatcaacagcggttttgctatccagtacattgagaatatcggcactgatcgtcaggttttgttgttgcagaaattgtggcgtccaggacaagcgggtgtcccaggtcaggctgctatccagtttttcgtcaacatactgcttgtaatcactatattcgctgatgtattgcgcatttgtcttaccaaggataatgcgagctttacgcgcttcttgccaggccagcgtattcgcccacactaacccgctcggttgatgcgtgaaatccatgtttaaggagatctttaatgggttattaaaatctgccactggaacgctatcgtaagagaccagattaccgttataaaccacctggttatcaccggtattgctctcctcataaccattgtttaagctcaagttgcccttgctcttgatatagctaaagacaatttgtgggttaatatctacctggcggatatgcaggggttcggccagttcaaaactgaggctgaagctatgcgttttggttttgccatcgttgttatattcagtaatggtggttttagtcgcgctgtcggtacgactgcttttgctgatttgatcatgcgcttcacggtaaacatagtttgcacgcgcaataacgttcttaccgattttctgctgcaatcccattgccagttcatcgttataaggcgttttcaaatcctgataacgcgtcagagttttattaccacttacgctttccgtccagctattgcggatatcacgtaatcccatatcaagaatattcccgccatagtaacggttataacctgctgtaatcatactggtttgattagcaaaaatatcccattccgtcataaagcgcggggagatattgtggttactcagatagttgtcatagtcataccgcacgccgggcattaaactcacattacgccagctaatgcgatccgccatatacagcgtgtagttgtcaattcccaggcggcctttacctttatggtaaatggtatggttagttttctttccggcagcattaatcacataggattcagactggttatggcgttcagtccacgcatcggaatagatgtattccgcgccgaagtagggttgatggctaacattacccacggcgaatttttgccagtccaggcgtgttttgaaggtgtaattatctacagcctgggaaatgtgtcctaatccgccacgggtgcaacgccctgtaatatcaccatatgtacaactaagttcggtgtaccagatgtcatgatcgtgacgggtataatcactaatatgatcccaaccaacggtggtacgcagtttggcccatgcgagctgcgtatccatatcccatgccagaccataggatttattacccatttcgcgatcagactgcgggaaggtgctggtattataatcacggctggagccggtatattttaaggttaaatcgtgggtaaagcggtcgctggcaaaccaggtaaatttgcttaatgcagtatcgataacgtttttatactgtgcccgaccggcgacaatgccgtcattgctaacataatccgcgcgggtgatatcagactggcggcggcttaaaccggcggtaacgccgaagttatcagcgagttcctgattaaagctcaaggtataaaagttctttttaaaatctggggagtaataagtacttccactagagccttgattaaatgcgctcttgttattctcatcgatatggcttgttaaccagtcgctacgcgtagtgcgataacccaatttcaccttgctatcatcagcgttgaagcgtttgatctttgcatcaattaccccgccattgaagcgaccaaattcaaccggcacaaaactgtcataaagcgtcacattgtccagtaagctgacatcaagataatacccctgactcatcccgctaatattggttgcactactggcatcggactcattcgctgggttcaggttattagttgcactaataccgtcaatcaaataggcattctggtaggggctcgcaccgtgaatagagattttctcagggcgaatatctccctggttcaagctggtactttgcgtactatccatgcgtaccgcagggttggttctcagcagatcgctgatattgccattcccggtcggtaaacgctcgatgctttcactggtgtaatgcgtgttgccgtttacgggtacagggacaggagcatagaccgtcatctcttcaaaaaaatgcatgtacatgtttttgtcatcgacggcctgcgccacatcagcgccacataaaatgacgccaggaataagaactcgcttcatttatttatatctccgtacagcagggcttttattgtttttataaaaccgcgctaatgtcacaaatatcatcggccaggttccagacaccgggttgatgtgtaaccataatgacgccgcttgtgggtagtttttcacgcactaaacgcagtaagcggatagcctcttgttcctcaagatgagaggtagtttcgtcaagaaatatccatttcggacgtcgtaaaattaatcgtgccagggcgatacgttgtttttcgccgctggaaagaatatctccccagcgatcgtggtcatgaatacgcgcagccaatttcccaagaccaacctgatgcagtacttcgctcaagcttttatcgtctacgggcaggggaagtgctttacaaataatctctttcagtaagccggttttgattaacggtgtttgactcacataccaactgtcagcaggagaagaaatatcacctttaaaccacggccagcagtgggataatgttttaagcagtgtggtttttcccgcgccagagtagcctttcagtaatagccatttgcctgggctaacatgaaagttcaggttctctaatatgatcttattatcaggcgtacgaatactcgcatcagccacttgtaccgcatgttggcaatttttaggcttattcgtagggcgctgttcagtgagttgatggaactcatacaagcgatcgataaccgcagccagttcagcaagttcgtcatatttataaataaaccagcttaaattgttgcttaccagcataaatgcctggcggcttttcatcagtccgcccagattgatctgcccgctaataaactgcggcaataacagaaagtagggaagaacgctaaggctgcggctataaatattctgccagtaatcaagccaccgctgacgattcattaaacgatgccagttctctttaatggtatgaaaattgtcgctcaactcctggcgttgtagagactcagcattgcttagcgcaatcagttctgcctgcttattatgctgcacaagatttgttcgaaatgtcgcttcgctacgttgtttttccacattaagcggacgaatacgtttacccaccttatgggtaaataaagttccaccgatcacaatgagcacgacggtatagaccatatacccctggatattccattctgttccaccaacagtgaaactgagcgtacccgcgctttcccaaagaataacggtaaaggtgatcagcatgctaagactctggatgaagccaaaactaagactgagcgttttgctgatcagtaagagaatgtcttcagcgatacgttggtcagggttatctgtatttttatgctcgccgtagatctgcgtgaagtagtagtttttatctgcaaaccaccgattaaggtagtaatctgttaaccattcgcgccagcgaatagtcagtagtttaattaaccatgttttgtttacggatattaatacaaagatccccagcagggcagggaaccaaaggacaagctgccaaagcttatcggtttctttctggcttagcgcattgaaaaaatcattattccagtcgtttaaccagacctgaattttaaccacgccaaggatcatggcgaggataataatgattaacaacacactagttttattattcttacgcagccaaaagggcttcaacagacagagatactttgctatcaacatacgaagcgtaatgggaatggttatcattagcgaaaattgattgtgccatccaatgattatctatggcaatgatttactgatgaaatttatttaagtatcatttaacaatatgaaatataaaggaatatttcattttcagtggttatggttatgctattgataatcaaggatattgctaatgccctgatgcataccacgtaagccaggattttcgcaagggaagatgatgatgacgaaacacccgacaggaatttatgtcgggtgccttgttaaggtcataagaaggaggctaagaatggagttaaaagagagcgttattaattattctccatttgttttgcaacatccataatgtggtaaagcggtactctgttcttagctaactctaccatggcgttcatataaggtaccatggtactaaaaaggattttataaccttcgcaaaaataagaaacagtctcattgtttactttagtaatacgatgcttaggacaaccgccattgcagataggtttatatgcacattgctgacatttcgctggaatccgttttttttgcgctgtcagttgtacactgttcatcgttttgagttcagatttattaatgtttccaattttgtactgtggatagacaaaatggtcgcattcgtaaatgtctccattactttcaacaaccagattatccttgcaggactcctggaaaatacaactggtatgcccattccccaaaaaacggctgacaaagctttcaaactgacggatgaaaatttcacccacatcgtttttaacccattgcataaaaatggtactcataaacttgccataagccgtgggaggcacagaaaaatcaatgatacggaatgtgttctcactatgaccactgaaatcaatattcggcgtcccggtttctagcaattcgataaattgcatatgtttactgccgatagattttaaaaaatgataaacctcaagagggtaatggacattaacgttattaatgacggttaacgtattaaactctacttgataacttttcagacgctcgatggctgctatcacttttgcaaaagtaccgttaccactattactgcgtctgtaacggtcatgtaactcctgggggccatcgatgctgataccaaccagaaattcatgttctttgagaaaggcacaccattcattattcaataaaatgccattcgtttgtaatgcattaaaaatacgtttttggcctgcatagcgttgttgatagtgaataactttacggaaaaaatccaggccagccagagtgggttcaccgccttgccaggtaaaatagacctgattgccagacgctgcgatatattgtttgatgaactctttcagagtgctgtcatccatccatttttcatgagtaaactggctctctttttcaaggtaaaaacagtaatcacatttgagattacattgaaaactggagggcttggctgtaacgtgcatcgctatctcgctcaataaggcggcggaaaaatccgccgcatgaaggtttagttatttcgcttcgcttagtgctttcttgatattgttaaacttctcctgatttacctcgctaagcggtggctggctgctgtcgataaactctcttaccacgccttgcatctctttaacgacctgcggattggcggcggcaaggttatctttttgctgtagatccgtcagtttgtagagacctaactgattgttttctactgtatagacaaggctataatcgttatttctcaccgtataagagaattggcttaagtcctcagtgttggggttatgcgggtaatcgtcactctgatggcgaacaaatttgtggtaattatcccagaatggaatattttcctcgtcaaaccagtgagaataagaggttatccaggtcagatttttatgtggctcgccttgtttcttatcttgcaaccagggcagcaaggaaacgccatccagcttaaggtcttttggaatgctgatatcggctgcatcaagagctgtcgggtagaaatccattgcggaaatcagcttgtcataattaccgggttgaagttttcctttccaccacataaacattggggtgtgagtaccgccaggataggtctgactcttatagcctttttgcgccccgttcagcggcagaggaccatcgataaccgcaccattatcggaggtaaagagaataattgtattgtcatactgtccgtttttcttcagttgttcgagaatgcgttttacaccctgatcaacagaataaacggaagcgtagtagttatctgctgtttgactaccggtattaaattgcttctgatattgatccggtgcaggattatcatttggcaggtgcggagcattataagccaggtaaagcataaaaggctggtcaagtgttttggcacgatcaacaacgccaattgcctcatcggttaactgatcgctgatataaccttttgcggggacacgttcacgatttttgaacagactaggggagttgtaatatgccgttcctgcagcgtggaatcccataaagtaatcaaagccacggttttgaggttgccattcttccgcagaaaatgtggtgaagttgtcatgatagtcacgcgtttgtttatcttccggtaccggcacattactgattttactcaagtgccatttacctactgctgcagtgtaataaccatgattctggaataattcaggcaagaaagtttctgttagcggaataccatcctgagcatcggtattggaatagacaccaaagcgggcgggagctcgaccggtcattattgcggcgcgggaggggccggaaacaccgtgtgccacatagccgttagtaaaacgtacgccttcatccattaaactaaggagcgtcggcgtacttttttgtgcagcttcaatggctttatctatccctattttgtaggtatcgacaacttcacgattttccattgtttttgggtcaaaagatcccttatcaaaaggaagttgtccataaccaagatcatccatggtcagtacgataatatttggctttcctttggtactgtattctgtcggcgtaaagtcactgaaagcaacgtttgttttggttgctttcagctttacatcatctgccgcatgagcagcaaatgcagccataccagatgccagtatcaaagatatgctggtacttacgacacttttctttaatgcagacttcataaatgttcctcttcttattgtacttaattccaaagtaattttacgaagagaaataagtggatgtaagtgaagttagtcacataaagagatagcagatttagctaaaaaaagggaaaaaacagtccataaagcgttgacattactttctgttctattaagtaatttctcgccgataaacaactaatttattgatatttaataaattattgcattttactgacaaaatgcagaattgagatcataaataatcatgcaacaggttatgcaagtgcataaatatgtgatggatgtcacttatttatttcaataaatatatcgcctaaaaacaacgcggggcagggaatggctgccccatttaattcttacgcagcgtgtgtggttgactactcgttagcaaataatcaaatagctaaagcattcatcgtgttgcccgtattcatacccgtgtgactttgacaacggtactccttagaaactctcttcggactgttgccgaaatgtttgcggaacgcataaataaaataagatgtactggcataaccacattgttcggcaattttattgacactaccttctacgcgtatcaaattttttgcgtgctgcattcttgcatctaaaagaatctgactgaatgtcgtttgctcttgcttaagttttttcttcaacaggctttcactgatgtacaggcagtcacaaatatctttcagcttccatgggtgcgccggcttcatgttgacaatatttctcactttcccagaaacggatagcacaccgttagttaatagtgtaatgaaacctttgcatgcggcaaaaatagacaggcaagaaaaaagcaaaagttcactaaaattatgatgattgcgttcttcgctgttgagataagcaatcatttcattaagcaatccagtcggtacattactagcacgtaaaaacttcgcaggaacaggcaccgtcactgtctggatgttagtgcattgtagatattttttaatggtattttcagtaaatccgatctctttaaaatgccgctcataaggttcaaaatgcgtacgaacagcgttatctaccatcaggatctcgccgtcagagaaggcgtaatctttatctaaaatgttagcgttgaaggcatgatgaataaatataacagaacaaacgaggctcattttatctccttaaaacaataaagtttttatcgatacttttttaacatttcatatttataatttgctgtttgttttcagccttgcaaactattgataatgaaatgtgtaagatctcttgcaatgcgacccatttctgaaatactcagctgatcaattgccgaaaaaatggctatcaacgtaagtgtcagtaataagacaaccacaattgcagacatgatttctttatagttgtctctttgcgtgattttgtttttcactgtggtcgcatgcatttcaaatatgtttatttagcggataacgttaaaaatcgttaatcagtatgcttaatataacaggctggagaaaagaggaaataggactggtgcttcagtactgagcggagtttcttacagctgtaggcagaagtttatatcttatagtatgtagtttaatttaatccatgtgagcaaattgcgaaataatagtcaatgaggaattcttctgctgtgcggatgacagcagaagaaatgagaagaggcattaattacttggttctaattcaaccggaatacttttatagccaggaatgccacttaatggatcgtggttatcaagtgttagcatgtgattgctttctggaaaataggtcaccagactgcggtcagccatagagtaaatgaccacttttaatctatccatgcggcgactgctgcgcttaccgtctggcgtaagcgcaataagattaactctttcgccgttttttacacggcaaattttagcttgtttagcactcataaagaccacatctcgttgaccgaatacccctcgatagcgatcatccataccataaatcgtcgtgttgtactgatcgtggctgcgtactgtcgccatgaccagcttactgttaaacgcactagagggatcttctaacagccctttgctggtaatgaaattagccttaccactcggcgtcatccagcgcctttcagcagctgcatttatcaggtgaaaaccaccgggatgacggatgcgctggttatagtcggcgaactctggcagcacagcttcaatgtcattgcgaatgcgatcataatcttccaccagatactcccaggctaccacgctctggggtagtgctgcctgcgcgattcccgcgaccactgcacactcacttttcagcattacaccggcgggttttaacacgccacggctggcatgaatcatgctcatactatcctcaacggttaccgcctgcgcaccgtttttttgcatgtcaatctcgctacgtcccaggaccggcagaatatagctatgccgtgcggtcaacagatgagagcggttaagcttagtggctacgtgtaccgccaaatctaattgcgttaacggtacagcgctcgcttcccgatctggcattgccagcgcaaaattgccccccatgcagatcaatgctcgagcctgccccgtacatattgcttgcatgctggtaattgcagcatgtccaggtgcatgaggtggggtgaagccatagcgctcacccagacgagccagaaactctgcagacggtttctcggtgataccgacggttcggtcgccctgtacattagagtgtccacgtagtgggcagatacccgcaccaggcttgccaatgttacctttcatcaacagcagattgaccagttgctgtacgttctgggtaccatgttcgtgctgagtgatccccattccgtaacagataatggtgcgttcggcagcggcatatgcgtcagccagttcggcgatttgtgtctgacttagtccagaaatacgttcgatatctttccactcggaattgagaacgtcacggcgtagctcgtcaaagccgacggtatgcgtttgaataaactcgtcatcaagcaaactaggccgacctgcggcgcttgcagcatcatcgcgctcaattaacaggcgcatcatccccttgagcaacgccatatcgccaccaatgcgcacgttatagtaggcactggccaactgagtctcagagttcgtcagcatttcaaacgggttttgcggtgcggtaaatcgctccaggccacgttcctgtagaggattgatggcgatcattttcgctccccgtttcactaaagcgcgcaagctagtcagcatgcgagggtggtttgtaccagggttatgcccaatgcaaatgactaaatcgcacttctcaaagtcttccagcaacacggtccctttacctacaccgatactcgctgccaaacccacgcttgtcggttcatggcacatgttggagcagtcgggaaagttattgctcccgtattcacgggcaaaaagctgataaagaaaggcagcttcattggaagtgcggccgctagtatagaattcagcctgattgggatcactatagctttgaaggcgtgcgccaatttcgtcgaaagcttgttgccagcttaatggcttgtaacagtcgctgacggcatcatatttcaaaggctgagtgagtcgccccgcagcctcaagctcgtggtctccccaggtaagtaaactttgaaccgtattctcagcaaagaaagaggcgtttacctgcttatccgtgacttcccaggcgattgcttttgcgccgttttcacaaatgtcgaaactcgcactgtgcttaggatctggccatgcacaacccggacagtcaaagccctctggcttattcatgtcaaacatggcaataacatcctggcgtatatccatctgcttacgtactgcattcgctacggatttaacagcaccccaaccacctgcagcaccctggtaggattcaatttttttcttcatctacttatcctgtgtggaaatgaattattaggatttgtaatagcgatgatgcacagtacatacaaagggattatcgccaacatggatatataagagtaggggactactctctttctatttttaatctattatcgttaaacaatagattaaatacgataagttaagcatcatctctcatagtgtttaaattaacatatttttcaatataaaaaataagactctggcttcaattgtgcgcggattttcttacaggtgtaggctaatagccttcacaaaataattatccgcgcaattttcgtgaatggagcgcatagactaaggtcaaaatcacaattattcatagataaaagtgacaccaatgacactctggacggttccggcactaaccttgtttcctgtttgtccataggttgcgcttaaacccagaggtactttgcttttatttactgtccccagggagacattttctcccgtagccagtatttttccattacgcattagagtgacacccactccgcttgcttttgttgcatcaggtgctgtgttagcaaacacttgtcggctactgtcagtggtggcaccgctaagataaaaactgagcttttgttcgctactgcaatatacgccaaggggtatttctgcgcttccaggaaagtccgggagatccacggtgacatttcgactatcaacggtgcagccgcctgttggcataacaacattgttattactaataatattccacgtaaaattacgcggatttccgcttcctaatgttgcaattttatacatatgaatacgggcaatgacttcccccgcttttatgacaactccaccggccgccccaactggggtaatatagagttttaacggtaatggcatcggtgtcttatcaccaatatccaatacgttggtatttgtcgtcaacgggaaggggtaggtcacattattccagtacaggcttcctttataactctgtagggagcctgcgaaagcactgccttgtaccaggtttatatgatcagtgtcgtaccagccgccgtaatcattccagcaacttatatgctgagacaagtctacaaccagattctggcccggctgtattacagggtcgagattaacataaacagaggttgtacctgctccaatactactcccgccatcgacattacaactgaaggcaaaaactttgcctgccattaatagaagataaataccgaacaggacctttatactgattgttttacccatgatatatcctaaggttaaaaattgatttaaaaagaaggctaagaaaatcgaatcgacgttattgccaggtgtagatcacattgattagcgcctcgatcgttccctggcttgcgtttccattcaccgtgatagctcttgccttaagtggaaactgtgcattacgagtgatctcatcaacaataaccgttttgctatcgccattttttaacgcagcatcctggtcatccctcagctctatctgaatattttcggcagtaccttcatttttgtaataacccgtattgtcagtactacctgtcacgattgccgtcactgcacttgtttcaaccggacaatcggttaaactcaaagtaatattgtgccagccagatgcagaaccaggttgttgcagattgcgcgtataaagatccccgagattaacgttagcttctttggtttgaatagtgcagggtttagcgactacccgaccattaacagtgatagtgacatcggcggcctggagagttgctgtgaataacgcgcaaaacgtagctaacaggaacctcttgtgaagtcttttcatatctgactctgattattgaaattcaagggtaaaggttgcgctagccctcaccagtcccggattgacggacttctgagtactcttcagacgagcggagtaaggcaaaatattgttctgttctggtaccagtgggatccactgcatcccggcatgaagatcattcagtttcaccggacgcatatttgcgtccaatatttctatacccaaaccggaggccgtattgcttccttcatccagtttcaacaaagtattattttctgcatcctcaataccgttaaatgcaacccgaacccccgttgtccctttgctgcattcacttaacgtaatctgaaaagggacggctggacttgtgctaccggtcgttggaaattgtctggcactgtttttttggagatctacggtaaaattaaggctatcgctactgactgtgcagccataatcgaggacgcgcccgctaattttaataacgctatctgcggataaagcagaataggtggttaaccccagacataaaccgaggaaaataatgttattgtatttcataatctattgttccttagcgacagattgctgtctgctggttcagtaaggtaccaggagaaacttcaggaagcttgtactcgacaatacagttactgtttttatctttgccccaactaacctgtaattgcccactctgtggaagtccagtcagataaacctgaccattttccgcgacaatgctgccatttttattctctccgtgtgtgacaattgcaccgaatggaacgctcttattaccgtacttcaacgtcattaatactttcccgccgatttgtgcattaaatgttgctctggcaatagcaccgtgagttgggatgacagtgaccacggtttcatccagttcaacattatctgcaagggaattcgcgttaagagcaacacggttttctctatattctgtcgcaaatggtaatatggcatagccacgccagtcggtatgaattccggtctggttctctattttgacattatcagcaccaggagccttaaccagaaccattgtgtcgcccagcggctgtccaaaggtgatgccatcagcatgagcaataatcccaccactcattccgtaataaatctggctgctgtcaccactccgactgtaaccgacattagtattaccataagctccacgataattaagagaactgtaaccactagtgccagagcttgtattacctccgtgggtgttaccgacctgaacgctataattcaggttattatccggcagcagagtgccataaaccccgcttagattggtcatgccgcctttcaaatcgttactcatactgtaactggcgttactattacgaaatgcgctctgactgtctgtacgcatccaatgactgaagggaacattaagcgtaaaagcgagtaaatgatcccgatcgttttgccatatattattggaatagctgtaattcaggctagtcgtaatatcaccaaacggcacatttaatccaaaacttatttgctggtcgctgcgactcgtgttccagtaactttggcgactggcactgaaaaatgtcgtaccgtaatttccaagctgctgagagatgcttatttgttcctgaccacgcttactgtagaacagattaaaataatcaataaattgtgtctgctcattggtgtctccggtaggaggcttgacggtgtaaccactcattcgactgtaggcactgtcggataagttataaaaaccttgcgtagaatagcgatatcctgcgacctggatattggttccacaacaagtttattgctgcacttgttgaagagagtatttgcaaaaacattttatgtcgctaaataacatgacgatttcattatgcatgttatttataaaccgtgactaaacagaatattattgcgaacaagggaagtgtcaggaaaggtcaagagctaccaatggttaatatggctataaatcattagctatggttaatgtttgcttgctgaaactaacaccgaattgctctaaacagataagtgcagggtttattaaagctgtccgacagactttcttaacctggtaatatctctcttgggtgactctccaaacatccgcgaatattcccgacactaatgggatagctttcgtaaccgacagcataggctgctgtggtgacatcgtaatgttcattcagcatctgtcgcctgacttcattgagacgtagccatttctgataccggagtggactcattcccgcttgatccgtccttaaataagtaacagcaccctctggtgttttcgtatgcagtgtctatgcgacagacactgcgctcttagcatggggcagggaataaccaggctatttctccatgcacaggccaattatgaaagaggagaggcttaagttcttgaaccctgaacgaataacgactaccagaaaagcacttcgcatcactcagacatgatttaacataatatacattatgcgcaccaatataaaccaaggaagaatccagtcgttggcggtcatgattgtcatgctcattaacaatgaccaaaccccatatctcacttactaccgtattctcggcttaaccgtccatgcaacctcaacacattgctttcaactgccgtcaccacgttctccggaaaatctgtcggtaaactagtcttcacgttatccagtgctgctggaatcattctggcaaagtcactcaggatttcatgcatctgcacttccgggaatctcagcacctttgctgtcgccaaaaaatgtcgcggataaattttatcgattgccgtttttttgcctttggatgcgttaagccccattgccagtttgagatcgctgatgtgtattcccgtaccgccaaggaccggaaatgcactaatgatgtcgtaaaatggcgtgagtcgataactgccgccagcctgaataaatacggagaagttttttgcatgaccgtccgttgcgccaatcaaccactggaagacctggaatttcataaaatcatagcgatctttcagcgcctcgctggaccccatcaaaaaagccatgatccgcgcgatgcctgggcctccatcactttcatatttcacgctactaggtaaaccgaatgtctgacacatatcctcctgtggcaagcgaagtaaaaccgttcgctcagcattccaacgcctgtcaaagcgttcgaccgctaacgcgcgcacatttcccgctttaatgatttctgcgtccggaacattcaacccaagttctttcgccagcagcagacagtaatactcattatcaacgctttggctgagatcgagcgtcgcattgggctgcctgatttcgccaatcggtaatttaatgatgtgcgtcgtcggcgttattcctttcggaatgcaccagtcattgcctattctgagcagtgctgtcttctcctgtgcgccagcaacgctgatgcgaaagtcattttcttctctaatcatgcctagcgggatatctgctttataagccgttaatacttcttcaagtctggcttcagtaagcttttcccatgccattatcggatgcgttacggtttcgtcttcgggtattaacgtcacggcaccaacgctgtctcgccctatttcactcaataaatcaaacggttgtctggatttggcatgataacgtttaacgatccggtcacgtacaatcgggctatcgggtaacaggttatcgaagaagttaaatacggcatcagaggtgatattccccctctgcaatggcaggctaagactcaacggtctggcataacggcttgctaaccactccggtgcatacttaaaggtgtgcgcgccgttggctaacttcgttaactcgcctacccgctggttgttcatccaagtgacaagtttaggcattaccactccagattttgctgttctgtactttctgggctggcatttttcgcgtcgcatagcgtcatactgagttcaaggctctgtaaaatcttaaaaaatgtcgtgagcgtggtattgtcagggttgttttcgaaattggaaatcgtcgcctgcttaataccaatttttttcgccagctcgctctgcgtccagccattttgctggcgaaccagtttcattgcattcgccaattgcgttgggctatagatcttctgaaagctcatcatgtcatacgtccacagcaagtttatccgcttaaggggatattataagttttatcctttagtgaggataagtcaatctggaaacacatcttatccgctctacgggataaacgctgcgatatccgcgatcgcggataaaaaggaggatttaaataaggcgttgatgcgccgtttgaagtcggcaatattaagccgcatgccatctcgacatgcggcttatacggtttaccagctatatttcactcccagcatgccctgagtatcgctatagcctttatcacctagttgcacaccgacattcccccacaggctaaggttgttatttactttcgcctcaaccccggtacgtacttcaccgagattacgcgcaccttcacggcctacggtttgaccattcatcttcacggcgtagactttgctattgttgatccagttcgcttcaatgtaaggctggaactcacgctgtttaccatcgtcacgctggtgatggctgttcaggtaggttttcaccccaagtcgcgtttgcacatttccgtcgccttccgtttcaatgcgcgttccgtctttccgggtatggtcggaatctttcacacccatccaggtgatttgcgcctgtggctggacgtaccaggtattcagcgtcccttcgctgccgctaaatgttcccgcttcaaaggtatacccaccctcaacagaggccgtcacaccgcgagaatcatagtcgtcagcagaacggttatcggaactgacgctgttatcaaaccagttatacagcgcccagctgtcaacataagcgccggtcttattcgcatcgttctgataccaggtcgcgtacagcccagcgctgtaaccgctgatgcgcccatcgcttttataacccacacgattactctgagtattactgtgctgattggcgtagcctgccatcacgccaagatgccagcgatcctgcgcgttgctactccactgcgccaaatcgccgcctagctgcaatacatagcggttagcctgagtatttagctgaccgtcaccggccctactacgttcgtgccctccgacatgacgcatccacatactgcttgcgctcccctgagaatgcagactatctgtatactgcggctcacccagacggtcgtgtaaacgatggctaaacaggctgttggctgcggcaatgttgctgatatagcttccggcctccgggcgataaacacttgggccttccggatccacaacagggggattattgatgggatcgggtgtatccgctggcgttacgccgtcccatttactggtcagataccagtttttctcgtcattccccttccctttagccagcgtgtagacgtaagccccagcttcgacagttccggtggtcagcgcgaagttacctgcagaattaccgccaacctcaatgagttcaataccgttgaccgtttgtgcaccgacgccgccaatgttatcaacccgaacgcgagtgttcccttgggtatcgcctttcacgttcatcttatcggtggggctattatcgccgcccagcgtcgcgttgaacgtcatcaggccattgtttccggtatagttgccgttaacggtcagtacattccccggtttccccccttcgctattcatttgaaccgtgccgccattctccaggttgccgccgatagtggttttagcgacacgcagtgccccccccaggcataacgttcatatcacctgcagtggtgacatttccgctcatcacaccgctgttatggatattaatgtgttgacttgccatattaatggcagagtcggaaccgaaagcaatttccccccccacgatatccgtcgtaccctgatatgccgcggaatcgttgttaagagtcaggatcccggtacccagttttgtcacatcaccgctaccgctgatactgtgcgtcatcgcccagctacgctcagtggagatggtgagcaggccattattgataacggaagcatcacccaggtttttctgctcgttgacgctgagcgcgctgcctgtatcaatgttgaattgccccacaaagcggctattatcgccatccaactctacatctgtcctggcggttgcgctcacgatacccttcccgcttatgctattacgcagttcgccagtcacgttttttagcgttaacagaccgtcattggcaatatttcctctgcctaacccctgagtattatcgaggctgacttccgcatttgggctaatgctggttaacgcattgtagcgtgcattaagcccctcgatagccagcgttccccctgtaacattcaggtttccgccacctgtcagttcaccctgactgatcccacctttatttaccgtcagcgccccctctttgaacaaaacagtgctacccatctgcccggtgaatgtctctaccgtctgcgtgcttccattaagatcgacgatggccgcgttgctgatgttcagttcccgggtgttgccaagtgcaccatccgcatcggtacgtaatgtccccatctgaacgtaggttgccccctgatagtcgttctgaccgttggaaaggctaacctgtcgcaccgtattgattgccagatccccttcaccaccgatttttgcgctcatatcggccgttgcgccataggctccgccatgttcggctaacgtcagcttttgcccaccatggatgttcagcgctttcagcccatagttaacgtacaaaccattacctggtgcggtcgtgaggcggaatccataatcaccctcggcgaccaccgttccgttttgcgcaatgtgtaacgttttgtccgcttccacctcgtcgccctgtaaatcacgtaacgttaaactgccaccgctcccaataaccgtttgcgccttcaccagttgaacgccgacatggctatcgtcgtgttccagcaaattgagcgtcgtcagagggttattcgccatgggatcattccacggtttaggcacgtcgataagcacgtcgcccgtcccgtttacctgatagttacggcctttccaggtgtagtcacccgcgccgacaaccagcgtatcgacgctgatatatccctccgcgagcgtcgcagcaggaatatccgtatcgaaaatgatggtacctccattcatggccagtccaccaatggattgctctccaacttttacgcttgtggtattttcactgtcagactgcaacatcgcgtgagtaagcgcagcggtgttgtcgcgttccagagtgaaggtactgtctttcagttgggcaacaccggcgaattcagtccctgttgcatgggtaaagccaaacatcttgtcggaggaactcagctgcactcgcatcaagccatcgcctttgagcgcattggtcagcgtgtaatctcctgcactgttcgtacttgcgagaatgtcgagcgtaccggggtttgcaatggttacttcactgctccccatgcccgttaccccatctgccgtatgagacgcaatggtcaggaggccgtcattgaccagcgttttaccgctataagtattccctgcattgaacaccgtatggcctgcatcatggatcacttttccgtctttatcgtcacctgtaatcagcatatcgacctggtagccggcatcactgttattggtatgattaaagacaaaaacgccttcgccaagaccaaactccactttcgtcgcattggtgataaatccggcatctgccgccgcctcaccgtgagcagcaccaatgtttagcgttcctacagcaggctcaaaaacacctaagtaaacttctccaccttcgacattcagcgtaccgttattcgtcagggttaacgtacccgtaccagatgtccctacgtacatattgaatgtttcaagaagagagttctgcccatccaccctcacgtcgcccttacttttgtcattgagagctatctgtgtatcacgcgctttaactatacctccggtggtaatattcagttcacccgtgcctaatacaccgacctgtagcaattgtgcgttagtagaacttgtctttaaattccagagactgtccgtactaatattaactatccccttaccggaggcatttcctccgataaatccatagcccgtactattaagggtggcaccattactgacatttacgataccgctaccaaaattaccgacattgatacccacagtatcgaagctacttgtcgcatccatcaggttcagtgtgccgataccgcttgctttatcgcccaaaaaagtaatattttggcttacgaacttaccgccatcgctaatattgaggtttccgacgcccgcaacaccaatggtggtatagacattcttattgacctcccacattccccccgtggtgatgctgacattcccgacgccggtttctccataaccgagactacttcctccgttgctgacaacaagcccctgattactgatattcatttcgccgtggccgtcataaccaagattagttccgagattagtgataacggagttcttatccttaacagtaatgttgcctgtgcctgtttctttcatccccgcagtgataattccgctatctactttgccttcactgctgacattaagttcaccgtcgccagcatcaccgatatagatatagcggaaagcttcgcccgttccgaggaaattccaatgccctttatcggtcacgttgacgacaccgtgggaaccgtcctgaacgcccaccaaactatattctttgttattaatcagtccattattggaaatattgactgtgccattaccgaaatatccattatagagtctgcgtaccgtgatgacagagtcttgatcctgcacattcagggttccgataccggtggcattgccaccgataatcgtattttcagccgtaaccaaccccccctcgcgaatagtcgcctccccagttccttgattaccaatttgaaattcaatactggaatcattattttttattagccactcgccacccttttcaacgacaacctggccattactgcccgcctgatagcctaaaatggcgacgatactactcgtgacgtaacccttatccgtaatatttaaactacctgtgccatagctacctatttcgaataattcggtcgtcagaacagagtcctctccctcaacattgaccgtcccgacgcctcctgtgctagaacctaatcttaaatagcctccatcgacgtgacccttctgtttaatattcagcgtccccgttccggattgacccacatttaaaggccttgcattatttccgctatcatacaatcgccaggtgccacccaaaacattaacggtgccctcactgtcctcattagcgccaatgacgctggtagtaatagtggttaaggaggcattaccgccagccaaaatattaagcactccagtgccataccagccaaccaggtaggcatcataagcaacatcagtatcaatattggtaatctgatcattatcaacttccagacttgcaccagacgcactaccgcttagtgccagcaaaacacccagcgtcaatctactgaatttcgttgtcagtccagaggatttacgcaaattaaccgtgcttgttttacctgccctgcgagttaattcgctgcaggcctgaaatacctgtagagtgcaattccatatcacgcgatagattctattcatataaacgctccatatacaaacaatacagccacgaaagagatgagtcgtcagacattaaaaatgaaacttattaaattgtcagaggtctgtattgagtgttagttggaggtgggaaggtgtcaatttggctaatttgctaatgctttcgaattgatagattaaaaattgcatagttcttattttatttaaatatgaactatgagttattgttgcttaataagaaaactgtttctttcaataggaaaattatcatcatcatatttaacaaagaatagcactaattgctaaaaatcgaagtttattaaaccccttttgcatccattagtgtctttaggaatattcgctataaaataagggttgtgcttaatgctttaagaaaaatagcaattttcccttgaatatcgtactggtgatggaacgatgaatctgcaagctggcttttaacaagccagctctaaaagaagggaaataagaataactatactcaaaaactaacagccacggtcatcatgatgtggctgtcaatgaaattataacccaggcgctttccataagctcgtcgtcagtccatgatcaaccagccccagctgatcctgataaactgcctgccacttatcgcgactatcctgataaagttcatgcttttccgggtctggtgtgtgcgtccgttcccagcgaaccaggcgttctccggtttctgccatactactaaaaattccggcaccgacgccagctgcaatggcacatcctaatgcagtggcttctttgaccaccggaatattgacgggtaatccgctgacatcagcgagaatttgactccataatttccctttactacctccgcctgcaaagactaagctactaggatgaatattgctgaaatcagcaatttgctgcaagttacacgcacttacaatcgccgcattttcttccagcgcacggaacaatgtcgctttgttacatttatccgggtcaatggacaagttaataaaggaaggcgcagcgtgataccaggttttaaagcgcattctgtcggagaagatcggcattacgccccagctcccaggcggcacccgactggccatctcttccagcagcgtataggtgtcgatgcctaaacgttcggcaatcagtttttcttcggcacagaaagcatcgcggaaccagcgcatggtgagtccggtaaaaaagcttatagattcagcttgtaccatgccaggaataacatgaggattaacgcgcacgttcatttctgggtctgtcaccggcgcggctaaatttacaacttgctgccagaatgtgccgccaagaaccgcggtttgtgccggacgcacaacgcctaacccaaggcaaccaagctgcacgtcgcctcctccaacgaccaccggagtgcccgccttcagaccgcagagttccgccgcttgactacttaccacgcccagcaatgtgccggtttctttgacaggagaaagaatatcggcacgtaggccagccatatccagcaatgcaggtttccagtcacgggtggttagatcaagaagtcccgtggtgccagcgttagagggatccaccgccagttcgccgctgagcatataggccagccagtcgctgatcatggtgatggtacttgcctgacggtaaatatcggaacgatggtgcgccagccaaagtaatctggggatggcacttaaagccagtgtttgtccggtcgcgcgataaacttcgttttcaaaggtattgttgtgcagttctttaagttcgctaacttcgcgtgccgctctggcatccacattggcgcaggcccagatcggggctccttcattattatataaaacaatgccttcacgcatgctacatgcgctaacggcagcgatatactccggggctatgccggcgttgtgcagcgcctggcgcatacactcacacgccagttgccagtttttgttgagatcaaattccatagaaccaggaacgtccggtactgccagatgccgccactccgcctgtcccactgctatttgattgccttccaggtcgaatatcacagcccgaatacttccggtgcctgcatccagcgccatcaggtagtacttactttcactaagggtaaagagtcgagccattagattatcctcggcttatgcgttctgtctgttcctctatacgttctccatcattcccggtaataaggtcatgcaaatttaactacgtaaaatcgccgctgctgtgtcctgatcggtaaccagtgcgttgatataaccgcctttcattgcagcggcaattgcttcggctttattttctccccctgccacgccaacccggacgggtatggtcttcagcgcgcttaaaggtaagccaatcagttcgttatgtattttgatattcgtgacaacgtcaccttttgcatcaaaaaagtagcctaaaatgtcgccaaccgccccttttcggccaatcattaactgttcgccctggctgatataaccggagcgaatgattgtcgcatcgtcctgttgactcacagcaccaatgccgacaatcgccacatccgctgcttgcgcggctaacagaacatctttgacgcaattttcattttttagcgtacgggcaatgtcagcggaggatgcccgcaacggagccggaataatattcacactgcacgccgcgttaagctgcccgattcccgtcatataagaaccgacgccaccggagagcgtgaccaggcgaatttgctgactgctaataaaaccacttaagcgttgcagcgtattcatggttgcctcgccaaaaccaatcgccagcatctgttgtggttgaagtaaactcatcaacatatgcgccgcgcctatccccagtcgcccaccgacatcagcatccgcaagcccagggatcacccggacatgttgcaggctaaactgacgacgtaattgagtttcatattccagacagccttcaaagcgagaattaatctgtacgcgaataatgccggactgatgccctttctccagcaatcggctcactttcaaacgtgtcaggccgagacgatcgctgatctcgctctgggtcagcccgtcgtgatagtaaaaccacgcgatccgcgcgacctgttcttcttcacacattccctgttcactaattgcgctatcgttgattgtcataattcattcttcactttgaacatatttaaatctttaatgcaattgttcagttcttgctcatttatatctgtgatggcaaccacagtttgactctacgagcatgaacaaacgcaaccgtgaaaatcaaaatagcataaattgtgatctattcgtcggaaatatgtgcaatgtccacctaaggttatgaacaaattaaaagcagaaatacatttgttcaaaactcacctgcaaaactgaacgggggaaatatgcaaacgagtgatacccgcgcgttaccgctactttgcgcccgcagcgtttataaacagtatagtggggtcaatgtcctgaaaggcatcgattttacgttgcatcagggggaggtccacgccctgctcggcggcaatggtgccggtaaaagcacgttaatgaagattattgccggtattacccctgctgatagcggtacgctggagattgagggcaacaactacgtcagattaacgccagttcatgctcatcagctgggtatttatctcgttccccaggaaccgctgcttttcccaagcctgagcataaaagaaaacatcctgtttgggctggcaaaaaaacagctctccatgcagaaaatgaagaacttgctggcggcgctgggctgccagtttgatctgcatagtctggcaggaagcctggatgtcgccgatcgccaaatggtggaaatcctccgcgggctgatgcgcgacagccggattctgatcctcgatgaacctaccgccagccttacccctgcggaaaccgaacgcttgtttagtcgcttgcaagagctgcttgctactggcgtgggtattgtttttatcagccataagctgccggaaattcgccagattgccgatcgaattagcgtgatgcgcgacggaaccatcgccttaagcggcaaaaccagcgaactgtctaccgacgacattattcaggccatcaccccagcggtacgggaaaaaagcctctctgccagccaaaaattatggctggagttacctggtaaccgcccacaacatgccgccggaacgccggtgctgacactggaaaatctgaccggcgaaggtttcaggaatgtcagcctgacgctcaatgccggagaaattctgggcctggctgggctggtgggggccggacgcacagaactggccgagacgctctatggtctgcgtactttgcgtggcggacgcattatgctgaatggtaaagagatcaataaattatccactggagaacgtttactgcgcggtctggtttatctgccggaagatcgccagagttccggactgaatctcgatgctagcctggcctggaacgtctgcgcccttactcataaccttcgtggattctgggcgaaaaccgcgaaagataatgccaccctggaacgttatcgtcgggcgctgaatattaaattcaaccaaccggaacaagctgcacggacattatccggtggcaaccagcaaaaaatcctcattgccaaatgcttggaagctagcccgcaagtattgattgtcgatgagccgacgcgcggcgtggatgtcagcgcccgtaatgatatctaccagctgttgcgcagcatcgccgcacaaaatgtggctgtgctgcttatctcctccgacctggaagagatcgaactgatggcagatcgtgtgtatgtgatgcatcagggcgaaattacccactctgcactgaccgagcgcgatattaatgtcgagactattatgcgcgttgccttcggcgatagtcagcgtcaggaggcgagttgctgagctaaagtcagcgtcaggaggcgtcatgctgaagtttattcagaacaaccgtgaaatcacggcactgctggcggtggtgctgctgtttgtattacccggttttctcgaccgccagtatttaagtgtgcaaacgctgaccatggtttatagcagcgcgcaaatcctgatcctgctggcaatgggcgcgacgctggtaatgcttacgcgcaatattgatgttagtgtgggtagcattaccggaatgtgcgcggtgctgttggggatgttactgaacgcaggatatagtctacctgttgcttgtgtcgcgactttactgcttggtttgctcgcgggatttttcaacggtgtcctggtcgcgtggctaaagatccctgccattgttgccacccttggcacgttagggttgtacagaggcatcatgttgctgtggactggcggcaaatggattgaagggttacccgccgaactgaaacagctctccgccccgctgctgcttggcgttagtgcaattggttggttgacgataattctggtggcatttatggcctggctgctggcaaagacggcgtttggacgcagtttttatgccacgggcgataatttacagggcgctcgtcaactgggcgttcgtactgaagccattcgcattgtggcatttagcttgaacggctgcatggcggcactggcgggaattgtgtttgctagccagattggttttatccccaaccagaccggtaccgggctggagatgaaagcaattgcagcctgcgtgctgggcggcattagtttgctcggtggttccggtgcgatcattggtgcggtactcggcgcatggttcctgacgcagatcgatagcgtactggtgctgttgcgcattccggcatggtggaatgattttatcgcgggtctggttctgctggcggtgctggtgtttgatggacgcctgcgttgtgcgctggaacgtaatctacggcggcaaaaatatgcccgctttatgacgccaccgccatccgttaaacccgctagcagtggtaaaaaacgggaggccgcataatgcgtattcgctacggttgggaactggctcttgccgcactgctcgttattgagattgtcgcatttggtgcaattaacccgcgaatgttagatctcaatatgttgctgttcagcaccagtgactttatctgcattggcattgtcgccctaccgctaacgatggtgattgtcagtggcgggatcgatattagctttggtagcaccatcggcctctgcgccattgcattgggcgtactgtttcaaagtggtgtgccgatgccgctggcgatactcctgaccttactgctcggcgcattgtgcgggctgatcaacgccggattaattatctataccaaagttaacccgctggtgattacgcttggcacgctgtatctgtttgccggaagcgctctgctgctttccggtatggccggagcgacggggtacgaaggtattggtggattcccgatggcgtttacagatttcgctaacctggatgtgctgggactccccgttccgctgattatcttcctgatatgtctcctcgttttctggctctggctgcataaaacccatgccggacgtaatgtgtttttgattgggcaaagcccgcgcgtggcgctttatagcgcgattccagttaaccgtaccttatgtgcgctctatgccatgacggggctggcgtctgcggtcgccgctgtgctgctggtaagctattttggtagtgcacgttccgatctcggtgcgagctttctgatgcccgccatcaccgccgtggtgcttggcggggccaatatttatggtggttccggttccattatcggcaccgccattgcggttttattagtgggatatttgcaacaaggtttgcaaatggcaggagtgccaaatcaggtgtccagcgccctttccggtgcgctacttatcgtcgttgtcgtaggtcgttccgttagcctgcatcgccagcaaattaaagagtggctggcgcgtcgggccaataacccattgccataaaggatatcttcatgacacttcatcgctttaagaaaatcgccttacttagcgctcttggcattgccgcaatctctatgaatgtgcaggccgcagagcgtattgcatttattcccaaactggttggcgtgggattttttaccagcggtggcaacggcgcacaacaagcgggtaaagagctgggcgttgatgtgacctacgacgggccgacagaacccagtgtttctggtcaggtacagttgattaataacttcgtcaatcaaggttataacgccattatcgtttctgcggttagccctgatggcttgtgtccggcactgaaacgcgccatgcaacgtggtgtgagagtgctgacctgggactctgatactaaaccggagtgccgctcttactacattaatcagggaacgcccgcccagttaggaggtatgttggtggatatggcggcgcgtcaggtgaataaagacaaagccaaagtcgcgtttttctacagtagccccaccgttacggaccaaaaccagtgggtgaaagaagcgaaagcgaaaatcgccaaagagcatccaggctgggaaattgtcactacgcagtttggctataacgatgccactaaaagcttacaaaccgcagaaggaatattaaaagcgtatagcgatctcgacgccattatcgcccccgatgccaacgccctgcccgctgccgcacaagccgcagaaaacttgaaaaatgacaaagtagcgattgtcggattcagtacgccaaatgtgatgcgcccgtatgtagagcgcggcacggtgaaagaatttggcctgtgggatgtggttcagcaaggcaaaattagtgtgtatgtcgcggatgcattattgaaaaaaggaagtatgaaaacgggcgacaagctggatatcaagggcgtaggtcaggttgaagtcagcccaaacagcgttcagggctatgactacgaagcggatggtaatggcatcgtactgttaccggagcgcgtgatattcaacaaagagaatatcggcaaatacgatttctgatgtgcattacttaaccggagtaagttatggcagatttagacgatattaaagatggtaaagattttcgtaccgatcaaccgcaaaaaaatatcccttttaccctgaaaggttgcggtgcgctggattggggaatgcagagtcgcttaagccggatatttaatccgaaaacgggtaaaaccgtgatgctggcttttgaccatggttattttcagggaccgactaccggacttgaacgcattgatataaatatcgccccgctgtttgaacatgccgatgtattaatgtgtacgcgcggcattttgcgcagcgtagttccccctgcgaccaataggccggtggtactgcgggcgagtggtgcgaactctattctggcggaattaagtaatgaagccgtggcgttaagcatggatgacgccgtgcgcctgaacagttgcgcggtggcggcgcaggtttatatcggcagcgaatatgaacatcagagcatcaaaaatattattcagctggttgatgccggaatgaaagtgggaatgccgaccatggccgtgactggcgtgggcaaagatatggtgcgcgatcagcgttatttcagcctcgcgactcgaatcgccgctgaaatgggggcgcaaattatcaaaacctattatgtcgaaaaaggttttgaacggattgttgccggatgtccggtacccattgttattgctggcggtaaaaaattaccggagcgcgaggcgctggaaatgtgctggcaggctatcgatcagggcgcttctggtgtggatatggggcgtaatattttccagtctgaccatccggtggcgatgatgaaagccgtacaggcggtggttcaccataacgaaacggctgatcgggcatatgaactctatctgagtgaaaaacagtaactgcggatctaaggagaagaattatgcacgtcacactggttgaaattaacgttcatgaagacaaggttgacgagtttatcgaagtttttcgccagaaccacctgggctctgtacaggaagaaggcaatttgcgcttcgatgtcttacaggacccggaagtgaatagccgcttttatatctacgaagcctataaagatgaagacgcagtggcgttccataaaaccacgccccactacaaaacctgtgtcgcgaaactggaatctttaatgaccgggccgcgtaaaaaacgtctgttcaatggtttgatgccgtgaggcgaatttatcaattttatctacaattggggtaacgcgctgacgggagtaaaaaaatgtctgactggaacccctctttatatctacacttttccgctgaacgaagccgtccggcggtggagctgcttgccagagtgccgctggaaaatgtcgaatatgttgccgatcttggctgtggcccaggtaacagcaccgcccttctacaacaacgttggcctgcggccaggataacaggcatcgacagctctccggcgatgattgctgaagcgcgcagtgctttgccagactgccagttcgtggaagcagacatccgcaactggcaaccggtacaggcactcgatctgatttttgctaatgccagtctgcaatggctgcccgaccactacgaattgtttcctcatctggtttctttacttaatccgcagggcgtgctggcagtacagatgccagataactggctggagccgacccatgtgctcatgcgcgaagttgcctgggaacaaaactacccggatcgcgggcgtgagccgttggctggcgttcatgcttactacgatattttgagcgaagccggatgtgaggtcgatatctggcgaaccacctactatcaccagatgccgagtcaccaggcgattatcgattgggtgactgccactggattacgtccgtggttacaggatctgaccgagagcgaacagcagctttttcttaagcgctaccatcagatgctggaagagcagtatccactgcaagagaacggacagatactgctggcatttccgcgtctgtttattgttgcccggcgtatggagtaaatatcacgtcagctggtaatgacgatcgggaagaatttttgctggaatttcggcttcatcgttcatctgtaacaggtcaatttcaatagcgttgcagatggcatccagtggtaaatcattgttttcagtaccgaacggatcttccagttcttccgccagacaatccaggctaataaaagtgtaggaaatcagcacagagataaaaggcgtcatgtaatgcaggtccacgaccagcgcgaacggcagcatgatacaaaacagataaacggtacgatgcaaaatcagggtgtaggcaaagggaattggcgtataggcaatgcgctcgcatcctgccaggaccgcactaatatcattaagccgatcgttgaggctaataaacaggatatcactaagctgtccattgcggcgctgaaccgccaaccattctcccattattaacaagatacggttagctggagagttgctagccagtacacgctgaagatcttcagtcttgagataatgagccagcacttccgcctgtggctgtttgcgtaatgtcatgcgtaaacagtgggcgaaagcgatttgcagccgggcaaactcccttacacttgcgctatccggcaatgtcgtttttacctcgcgcagtaagctccgactggcaatcatcaactgcccccaaagttttcgcgcttcaacgtaacgggcgtacccggcattattacgaaaaccaagaaaaatggcgatggcgacaccgagaatgctgaacggtgcgagggtgaatttgatgcccagatgcgtgtaccagggcagcatgaaaataacagcgatagaaaagagaaaattgagtagtaagcggctggatatcttggataatacactgccgtgccagacaaaaatacggcgcagccagtgttgttgtggacgaacaatcatggttatcttcaggcgtggaaaagtcgccctattaaacgtgattacgatcacattctcaagacgctacttacaaattacctacaagcttacaacattagcaggcgctgcatgtggcacctgttaatgataaaggcatataggatgttgtaactaatatggtgaaataagaaacccggtcgaaaccgggttcagaagtaacggtgttattagcacaacggacgtacagcttcgcgcatccctttttcgagaatcgcatccaggtcattagcaacctgctcgaccagaccaggcacttgcgtcaggtcctgctcccagtggtctttttctgccaaaacaatcgctaccagttcctgggtgccgataacacggtcacgatgctggctccagagttgctgataacgttccagccagtgtgcatcgtcctgtaccggatatgtttcgccgttacgctcaccacgatagaacgcaatcaatgccgctaatgcgaaagtaaggcgcgccggaagtgtgccgtttgccttctgccctgccagcagctgtggcaggatgcgggtgcggaacttggtcataccgttgagcgcgatagacagcagctgatgcttaatgtacgggttacggaaacgcccggtgactgcactggcgaaagattccagttcatcacgaggcaaatccagtaccggaataatttcttcgtagatagctttttcaacgaatgcgcaaatttcagcatcgttcatcgcttcacctacggtatccagccctgcctggaacgccaccggcaccagcgcggtgtgcgcaccgttgaggattgccactttgcgttctttgtacggtttaatatcgtcaacaatcagcacgttgagcggatatttgtccagacgcagttcagtcgctaaggatttcggtccctgaatcacaaacaggtaaaagtgttcagcggtgtcgagaaaaccatcgtgataacccagttcttcttccagtttagccacttcatcgcgcggataaccggtaacgatacggtccaccagcgtagaacagaagctgttagcctgatccagccattgaataaatgcttctggcagtgcccactcttgcgcatagcgcagcaccagttcacgcaacgcgtcgccattgtagtcaatcaactcacacggaatgatgatccaacctttatccagcgcaccgttgaaatggctaaagcgttcgaacagcagacgggtcagttttgccggatagcttaccgctggcgcgtcatcgaatttatcgcccgcatggtagctgatacccgcttcggtggtgttagagaaaacaaagcgcatttccgggttgtgcgccagtttcaggaattcatcgtattcactgtagacgctgatttcacgattaacgctgcgaatcagacgcgcgtcgctgaccgcttcccccttctcattcaggccacggataatggtggtgtacagaccatcctgcgtgctcagactcggcgggaaactagtttcaatcggacgaacaacgaccacgccagaattcagatcggtgtgctcattcaggagatcgatttgccagtcaacaaaggcgcgcaggaagttaccttcaccaaactgaatgatacgttctggatactgtgcaccgggaaaatcgcgacgatttagtgttttcacaatgggttcccttctgattagtcatacaacctgtttgaattggtacgacaggttagcaaactttaatacgccgaacccctgttttgatcaactcctgatgattaatgagcagttttatgagaaaagtgtggcgcggatcatggtttaatcgaggaaaaacgccttttcctggatcataaagtggtagaacacattgcattcaaatcgcgcgtaatgaataaagatgtcagacaacttcctcaccgtaacgcatagtgctggtacggttgcgcccatctttcttgctgcgatacagacacgtatcggcttcgaccatcaatttattaaagtcatcggtcagcgttaggtagcttgcgcgaccactaccgacgccaatacttaccgtgagataaagcgttttttgttgccaggtgaatggttgcagttcaacgcctttacggattttttccgccattagcagaccatcgacaggattcacgctcggcactgcaacagcaaattcttcgccgcccattcgcgccaccagccccttatcaccgacaatcttctgaatatgccgggcaaacacgcttaacactttatcgccacattcatgtccatagttatcgttaatgcttttgaaatagtcgatatcaagcagcatgacagtcagatgttgtgtctgtttcaggcttggacttttcagcgcctcataaagaccggaccgactgtaaacctgagtcagaaaatcaaagtcggctcgcagcgcaacttgcttcattaggctattgatcgctgccacgctaaaagaaaccataattgggcatatcgccatcgtggcaataccgagacgtgcggagaacatttgcggaatggagaacgggctaccgacgctgatatcaatcacgctatttgccaccagtacgatttccaccgcaccggtgacaaaggtcaacagacatgttacctgcggcgtatagcgcactgcacaccagattaatgcaggcagcgggaacgccagactccccgctccgccaatgactacgctggcaataacgctcacaataagcgcgatggcgggcatcatctgttctgctttaaagcgcggcagcactccaggaatagccaacgtcagcatacaaggcacgatcaacacgcccgtactgaattgctcactgaaccagtccgcaagcaaaggccagaaatccagactatcaatactgaccgaaccaagatagcatgttcgctgacagcggcggcaaataaaggtaccctgggaatgctattttgtcgttttccgcaattctcatggctgattcatctgtacaaccagccagtgatagattaccgccacgatataacgttgttgttcttcgcttaagctaacaccctgcggaatgttatgccacttagccagacaaccgcgacagcaggtcgcggtggcgtgctgagcgataaacaccggatgcccgcgcatgggggtttgcttaccgtcattagccggtaatgccggagcaagacgtttagcgacaaaatccgccgcatgttgttcgatgactggcgcgcctttctccaggcaatactgacgctctttcatgcccagacgaaagcgagagcgaaatttactacgggataaacgcgcgaagagtggatcgagagactgcattaataaacgctacgccctaactgtttcgtcaattgttcaagaacggcaatacccgcaaggctgttacctgcatcatccagttccggactccagacagcgatggccatttcatgcggaacaatcgccacaataccgccaccaacgccagatttcgccggtagccccacccgccaggcaaactcccccgcgttctggtacataccactggtcgccatcagcgcgttaatttgccgcgcctgcattggcgtcaccactggttcatcaatatgaatagctttcccctgattagccagaaagacaaacgtccgggccagctctacacagctcattttcagagcgcagtaatgaaagtagttttgcagaacggttgtcacgtcatgatggaaattgccaaagctcttcatcagccaggcgatagccgcatttcgcgcggaatgttcaaattcggaacgcgctaccaccgtatcgtaggaaatatcagacacaccgcttaagccgcgcacgacttccagcatacgttgccgtggtgcgcttaatcgcccttgcaacatatcgcagaccaccagcgcaccggcattaatgaacggattacgcggtataccctgctccatttccagttgcactaaggaattgaacggacttccagacggatctttgccgacgcgttgccagatttcctcttcggagtaatgacgcatggcgacaacgagactcagcactttggaaatagactgaatggaaaaacgttcttgcgcgtctccggcctgaaaaagctgtccgtcaacggtacagatagcaatccccaatcgggaaccgtctactgtagccagcgccggaatataatccgcgactttaccctgaccaatgagcggccgcacttgccgcaagatgttttctaaaattgcattatccatggcgactgccactttctactcctggaccgcaggtctgaaaagacctgcgagtatatcagagctgaatatgtcgcgtcagatccggtctttccacaccgtctggatattacagaattcgtgtaagccgaaatgggaaagctcacgaccaaagccactctttttcacgccaccaaaggccactcgcgcgtcgctggcacaataaccattgataaacaccccaccgcattccagacgtgccgccatctgtctggcctgtgtttcgtcagtggtaaaaatggtcgcactaaggccgaactcactatcattagccagttccagtgcatgttctgcatctttcgcaatggtgattgccgcaacggggccaaacatttcttcccgaaacgcggtcatttctggggtaacattcgccagaaccgttggcggatagtagttacctgccccagccatcttttccccgcccagtaacaaacgcgcaccctgcgccagggttttctccacctgatgatgcagctcatcacgtaaatcaaaacgagccattggtccgagagcgttctcttcgtcacggggatcgcccattttcaaggctgccgcagctgccacaaaacgttcggtaaatgcgctagcaattccctcttcgataataaagcgttttgccgctgcacatacctgtccggtattctgataacgtccggctaccgccgctttcaccgccagttccagatcggcatcgttaagcacaataaacggatcgctaccgcccagttccagtacgcattttttcagtgccgctccagcctgtgcgccaatagccgctcccgcacgaacacttccggtcaccgtgacagcagcaatgcggctgtctttaatcatctgactgacaccgtcgttgtcggcattcagccagccatatacgccttgtgggatacccgcatctttaaacacctgggcaatgagctgtgcacagcccatcacattcggcgtatgtttaagtaagtagccgttacctgcaagaatgatgggaacagcgccacgcatcacctgccataacggaaaattccacggcataatcgccagaatcgtccccaacggtcgatactcaataaccgcctgctgattttccaccagcgtaggttccgccttcagcattgccggaccatgttctgcataccagtcacacaaattcgcgcttttcgccacttcagcgcgcgcctggttgattggtttgcccatttcgcgggtgatcatttgcgccatttcttcgctacgagcgcgcagagccttaccgatatcacgcagtttttcagcacgataatctatatttgtctcgcgccagtcgcgaaagcctgctgccgccagctgaagtgcgttttcgatatcgtcagcgccagcccacggcagcacagaaagttgttcacccgtggcaggatttatgctaattgcatgagttgccggagtaatggtcatcggggtatctcctttatgagtcatggtatgaagatacgcagatttactcttgctttaaaatgaataatattaagccacttattcacgaatcgagaatgctatggatctgacccaactggagatgttcaacgcggttgccgaagctggcagcataacccaggctgcagcaaaagtgcatcgcgtgccgagcaatctcactacccgtctgcgccagctggaaacagaactgggggttgatctgtttattcgcgagaatcagcgtttacgtctctctcctgccgggcataactttttacgctatagccaacaaattctcgcgttagtggatgaagcgcggagcgttgtcgctggcgatgagccgcaaggtttattttctcttggtagcctggaaagcaccgctgcagtgcgcattccagccacgctggcggaattcaaccgtcgttatcccaaaattcagtttagtctttccaccggcccttccggcactatgctggatggtgtactggagggaaaactgaatgcggcgtttattgatggacccattaaccatactgccatcgacgggataccggtataccgcgaggaactgatgatcgtcacgccacaaggatatgcgccagtaacccgtgccagtcaggttaatggcagtaacatttatgccttccgcgccaattgtagctatcgtcgccacttcgagagctggtttcatgctgacggtgccgctccgggaactatccatgagatggagtcttatcacggaatgttggcctgtgtgatcgcaggagcaggcattgcgcttattccgcgctctatgctggaaagtatgccggggcatcaccaggttgaagcgtggccgttagctgagcaatggcgttggttaacaacctggctggtctggcgtcgtggtgcgaaaacacgtccgctcgaggcatttattcaactgctggatgtgcctgacagcgcaagacagggatatcaatgagctatttttgatagttcttgcggttaatatgctctatatagtgatgttccgatgacttatgactatatggggcaaatatggttacgccagtaagcatcagcaattacatatctcttcctgatgattttcccgtacgtaatattgcaccgcaggtaaaagaagttttaaaggattttattgatgcacttagtacaataatatgtaatgaagagtggcgcacgtctttaaacatcaacagtgccacaaaaaagatatttaataaccttgacaacttaagttatattcagaggacttcttttcggggtaacgacacgctatacaatgaaaaggttcagtttaaactcacttatcccgccaggaatggaagacacaaagaaaatattgaatttcaggtagtaataaatttaagccctatttatttagataattttcgccatgatggagaaattaatattttttgcgctcccaacccaaagcctgtcactatggggcgcgtatttcagaccggcgtcgagcgtgtactctttctgtttctgaatgattttattgaacaatttccaatgatcaaccctggtgttcccatcaaaagagcgcatacaccacatattgaacccctgcctagcgatcaccataccgctgcagattacttacgccagtttgatttgcttgtcctgaattttatctctcgcggtaattttgtcatactcccccgattatggagtaactctgaggttcacagatggttcgtcaataaagatcctaacttgatcaccgccattctcgacataacggacagcgaattaaaagaggatttgttgcaaagcctgatggatagtttaggttctaacaaacatgtactacccgaagtctgcatctgctttttatcccttttagcagaacaagaatctcctcattttcagaacttgtttttatttttcgccaatatgttattgcactatcaccaatttatgaatcccaatgaaagtgatttgaatgacgtgttgatgccagcaagtttaagtgatgataaaattatcaaacatatggcgcgcaggaccctcaaactgtttgtaaaaaatgaaacaccgccaaaagttactcacgaagacctggtgaaaaacaggcctcgctcccctgtcagaccacctatacccgcaaccgccaaaacgccagacctccctgaacgtcattaaaccgtgatgttaccgactctctgacgcgtgaaagaatcagcgtcagagaaacggaaaacgcgatccagatcacaaatgcattgtattcacatcattaaccgttttaagatcatttcatcactttttcgcaactcacccgataatctgttatgacaacaaacactgtttcccgcaaagtggcgtggctacgggtcgttacgctggcagtcgccgccttcatcttcaacaccaccgaatttgtccctgttggcctgctctctgacattgcgcaaagttttcacatgcaaaccgctcaggtcggcatcatgttgaccatttacgcatgggtagtagcgctaatgagtttgccttttatgttaatgaccagtcaggttgaacggcgcaaattactgatctgcctgtttgtggtgtttattgccagccacgtactgagctttttgagctggagctttaccgttctggtgatcagtcgcattggtgtggcttttgcacatgcgattttctggagcattacggcgtctctggcgatccgtatggctccggccgggaagcgagcacaggcattgagtttaattgccaccggtacagcactggcgatggtcttaggtttacctctcgggcgcattgtgggccagtatttcggttggcgaatgaccttcttcgcgattggtattggggcgcttatcacccttttgtgcctgattaagttacttcccttactgcccagtgagcattccggtagtctgaaaagcctcccgctattgttccgccgcccggcattgatgagcatttatttgttaactgtggtggttgtcaccgcccattacacggcatacagctatatcgagccttttgtacaaaacattgcgggattcagcgccaactttgccacggcattactgttattactcggtggtgcgggcattattggcagcgtgattttcggtaaactgggtaatcagtatgcgtctgcgttggtgagtacggcgattgcgctgttgctggtgtgcctggcattgctgttacctgcggcgaacagtgaaatacacctcggggtgctgagtattttctgggggatcgcgatgatgatcatcgggcttggtatgcaggttaaagtgctggcgctggcaccagatgctaccgacgtcgcgatggcgctattctccggcatatttaatattggaatcggggcgggtgcgttggtaggtaatcaggtgagtttgcactggagtatgagcatgattggttatgtgggcgcggtgcctgcttttgccgcgttaatttggagtatcattatatttcgccgctggccagtgacactcgaagaacagacgcaataattgaaaggcccattcgggccttttttaatggtacgttttaatgatttccaggatgccgttaataataaactgcacacccatacataccagcaggaatcccatcagacgggagatcgcttcaatgccacccttgcccaccagccgcataattgcgccggagctgcgtaggcttccccacaaaataaccgccaccaggaaaaagatcagcggcggcgcaaccatcagtacccaatcagcgaaggtactactctgacgcactgtggacgcgctgctaataatcatcgctatggttcccggaccggcagtacttggcattgccagcggcacaaaggcaatattggcactgggttcatcttccagctcttcgctcttgcttttcgcctccggactatcaatcgctttctgttgcggaaagagcatccgaaaaccgataaacgcgacgattaagccgcctgcaattcgcagaccgggaatgctaatgccaaatgtatccatcaccagttgcccggcgtaatacgccaccatcatgatggcaaatacgtacacgctggccatcaagctctgacgattacgttcggcactgttcatgttgcctgccaggccaagaaataacgcgacagttgttaatgggttagctaacggcagcaacaccaccagccccaggccaattgctttaaacaaatctaacattggtggttgttatcctgtgtatctgggttatcagcgaaaagtataaggggtaaacaaggataaagtgtcactctttagctagccttgcatcgcattgaacaaaacttgaaccgatttagcaaaacgtggcatcggtcaattcattcatttgacttatacttgcctgggcaatattatcccctgcaactaattacttgccagggcaactaatgtgaaaagtaccagcgatctgttcaatgaaattattccattgggtcgcttaatccatatggttaatcagaagaaagatcgcctgcttaacgagtatctgtctccgctggatattaccgcggcacagtttaaggtgctctgctctatccgctgcgcggcgtgtattactccggttgaactgaaaaaggtattgagcgtcgacctgggagcactgacccgtatgctggatcgcctggtctgtaaaggctgggtggaaaggttgccgaacccgaatgacaagcgcggcgtactggtaaaacttaccaccggcggcgcggcaatatgtgaacaatgccatcaattagttggccaggacctgcaccaagaattaacaaaaaacctgacggcggacgaagtggcaacacttgagtatttgcttaagaaagtcctgccgtaaacaaaaaagaggtatgacgatgtccagacgcaatactgacgctattaccattcatagcattttggactggatcgaggacaacctggaaagcccactgagtctggagaaagtgagtgagcgtagcggttactccaaatggcacctgcaacggatgtttaaaaaagaaaccggtcatagtttaggccaatacatccgcagccgtaagatgacggaaatcgcgcaaaagctgaaggaaagtaacgagccgatactctatctggcagaacgatatggcttcgagagccaacaaactctgacccgaaccttcaaaaattactttgatgttccgccgcataaataccggatgaccaatatgcagggcgaaagccgctttttacatccattaaatcattacaacagctaattgaaaacgtgacaacgtcactgaggcaatcatgaaaccacttagttccgcaatagcagctgcgcttattctcttttccgcgcagggcgttgcggaacaaaccacgcagccagttgttacttcttgtgccaatgtcgtggttgttcccccaagccaggaacacccaccgtttgatttaaatcacatgggtactggcagtgataagagcgatgcgctcggcgtgccctattataatcaacacgctatgtaatttgttctggccccgacatctcggggcttattaacttcccacctttaccgctttacgccaccgcaagccaaatacattgatatacagcccggtcataatgagcaccgcacctaaaaattgcagacccgttaagcgttcatccaacaatagtgccgcacttgccagtcctactacgggcaccagtaagcttaacggtgcaacccgccaggtttcatagcgtcccagtaacgtcccccagatcccataaccaacaattgtcgccacaaacgccagatacatcagagacaagatggtggtcatatcgatagtaaccagactgtgaatcatggttgcggaaccatcgagaatcaggctggcaacaaagaagggaatgattgggattaaagcgctccagattaccaggctcatcaccgccggacgcgtactgtggctcatgatctttttattgaagatgttgccacacgcccaactaaatgctgccgccagggtcaacataaagccgagcatcgccacatgctgaccgttcagactatcttcgattaacaccagtacgccaaaaatcgctaaggcgatccccgccaattgtttgccatgcagtcgctccccgaaagtaaacgcgccaagcatgatagtaaaaaacgcctgtgcctgtaacaccaggctagccagtccagcaggcataccgaagttaatggcacaaaaaagaaaagcaaactgcgcaaaactgatggttaatccataccccagcagcaaattcagtggtactttcggtcgtgcgacaaaaaagatagccggaaaagcgaccagcataaagcgcaaaccggccagcatcagcggtggcatgttatgaagccccactttgatgaccacaaaatttagcccccatacgaccactaccagtagcgccaacaccccatcttttcggctcattctaccgcctctgaatttcatcttttgtaagcaatcaacttagctgaatttacttttctttaacagttgattcgttagtcgccggttacgacggcattaatgcgcaaataagtcgctatacttcggatttttgccatgctatttctttacatctctaaaacaaaacataacgaaacgcactgccggacagacaaatgaacttatccctacgacgctctaccagcgcccttcttgccagcagcttgttattaaccatcggacgcggcgctacgctgccatttatgaccatttacttgagtcgccagtacagcctgagtgtcgatctaatcggttatgcgatgacaattgcgctcactattggcgtcgtttttagcctcggttttggtatcctggcggataagttcgacaagaaacgctatatgttactggcaattaccgccttcgccagcggttttattgccattactttagtgaataacgtgacgctggttgtgctcttttttgccctcattaactgcgcctattctgtttttgctaccgtgctgaaagcctggtttgccgacaatcttagctccaccagcaaaacgaaaatcttcagtatcaactacaccatgctaaacattggctggaccatcggtccgccgctcggcacgctgttggtaatgcagagcatcaatctgcccttctggctggcagctatctgttccgcgtttcccatgcttttcattcaaatttgggtaaagcgcagcgagaaaatcatcgccacggaaacaggcagtgtctggagcccgaaagttttattacaagataaagcactgttgtggtttacctgctctggttttctggcttcttttgtaagcggcgcatttgctagttgcattagtcaatatgtgatggtgattgctgatggggattttgccgaaaaggtggtcgcggttgttcttccggtgaatgctgccatggtggttacgttgcaatattccgtgggccgccgacttaacccggctaacatccgcgcgctgatgacagcaggcaccctctgtttcgtcatcggtctggtcggttttattttttccggcaacagcctgctattgtggggtatgagtgctgcggtatttactgtcggtgaaatcatttatgcgccgggcgagtatatgttgattgaccatattgcgccgccagaaatgaaagccagctatttttccgcccagtctttaggctggcttggtgccgcgattaacccattagtgagtggcgtagtgctaaccagcctgccgccttccagcctgtttgtcatcttagcgttggtgatcattgctgcgtgggtgctgatgttaaaagggattcgagcaagaccgtgggggcagcccgcgctttgttgatttaagtcgaacacaataaagatttaattcagccttcgtttaggttacctctgctaatatctttctcattgagatgaaaattaaggcaagcgaggaaacacaccacaccataaacggaggcaaataatgctgggtaatatgaatgtttttatggccgtactgggaataattttattttctggttttctggccgcgtatttcagccacaaatgggatgactaatgaacggagataatccctcacctaaccggccccttgttacagttgtgtacaaggggcctgatttttatgacggcgaaaaaaaaccgccagtaaaccggcggtgaatgcttgcatggatagatttgtgttttgcttttacgctaacaggcattttcctgcactgataacgaatcgttgacacagtagcatcagttttctcaatgaatgttaaacggagcttaaactcggttaatcacattttgttcgtcaataaacatgcagcgatttcttccggtttgcttaccctcatacattgcccggtccgctcttccaatgaccacatccagaggctcttcaggaaatgcgcgactcacacctgctgtcacggtaatgttgatatgcccttcagaatgtgtgatggcatggttatcgactaactggcaaattctgacacctgcacgacatgcttcttcatcattagccgctttgacaataatgataaattcttcgcccccgtagcgataaaccgtttcgtaatcacgcgtccaactggctaagtaagttgccagggtgcgtaatactacatcgccgattaaatgcccgtaggtatcattaaccaatttaaatcggtcaatatccaacaacattaaataaagattcagaggctcagcgttgcgtaactgatgatcaaaggattcatcaagaacccgacgacccggcaatcccgtcaaaacatccatattgctacggatcgtcagcaaataaattttgtaatcggttaatgccgcagtaaaagaaagcaacccctcctgaaaggcgtcgaaatgcgcgtcctgccagtgattttcaacaatagccagcattaattcccgaccacagttatgcatatgttgatgggcagaatccattagccgaacgtaaggtaattcatcgttatcgagtggccccagatgatcaatccaccgaccaaactggcacagtccataagaatggttatccgttatttctggcttactggcatctctcgcgaccacgctgtgaaacatactcaccagccactggtagtgggcatcgatagccttattgagatttaacaagatggcatcaatttccgttgtcttcttgatcattgccactcctttttcacagttccttgtgcgcgctattctaacgagagaaaagcaaaattacgtcaatattttcatagaaatccgaagttatgagtcatctctgagataacattgtgatttaaaacaaaatcagcggataaaaaagtgtttaattctgtaaattacctctgcattatcgtaaataaaaggatgacaaatagcataacccaataccctaatggcccagtagttcaggccatcaggctaatttatttttatttctgcaaatgagtgacccgaacgacggccggcgcgcttttcttatccagactgccactaatgttgatcatctggtccggctgaacttctcgtccatcaaagacggccgcaggaataacgacattaatttcaccgctcttatcgcgaaaaacgtaacggtcctctcctttgtgagaaatcaaattaccgcgtagactaacgctagcgccatcgtgcatggtttttgcgaaatcaacggtcattttttttgcatcatcggttccgcgatagccatcttctattgcatgaggcggcggtggcgctgcatcctgttttaaaccgccctggtcatctgccaacgcataaggcatgacaagaaaacttgctaatacaatggcctgaaatttcatactaactccttaattgcgtttggtttgacttattaagtctggttgctatttttataattgccaaataagaatattgccaattgttataaggcatttaaaatcagccaactagctgtcaaatatacagagaatttaactcactaaagttaagaagattgaaaagtcttaaacatattttcagaataatcggatttatatgtttgaaaattattatattggacgagcatacagaaaaagcaaatcacctttacatataaaagcgtggacaaaaaacagtgaacattaatagagataaaattgtacaacttgtagataccgatactattgaaaacctgacatccgcgttgagtcaaagacttatcgcggatcaattacgcttaactaccgccgaaagttgcaccggcggtaagttggctagcgccctgtgtgcagctgaagatacacccaaattttacggtgcaggctttgttactttcaccgatcaggcaaagatgaaaatcctcagcgtaagccagcaatctcttgaacgatattctgcggtgagtgagaaagtggcagcagaaatggcaaccggtgccatagagcgtgcggatgctgatgtcagtattgccattaccggctacggcggaccggagggcggtgaagatggtacgccagcgggtaccgtctggtttgcgtggcatattaaaggccagaactacactgcggttatgcattttgctggcgactgcgaaacggtattagctttagcggtgaggtttgccctcgcccagctgctgcaattactgctataaccaggctggcctggcgatatctcaggccagccattggtggtgtttatatgttcaagccacgatgttgcagcatcggcataatcttaggtgccttaccgcgccattgtcgatacaggcgttccagatcttcgctgttacctctggaaaggatcgcctcgcgaaaacgcagcccattttcacgcgttaatccgccctgctcaacaaaccactgataaccatcatcggccaacatttgcgtccacagataagcgtaataacctgcagcatatccgccaccaaaaatatgggcgaaataactgctgcgatagcgtggcggtatagcaggaagatccatattttccgccaccagcgcccgcaattcaaaatcatcgacatcctgcattgcttcgttttcttccaggcaatgccagcgcatatcgagaagtgcggcgctaagcagttcgctcatctcataccctttgttgaacaggctggcattacgcattttctgttgcagttcgtcaggcattgctgccccgctctgataatgccgggcgtagcgagcgaatacctgcggatgcgttgcccagtgttcgttgatttggctcggaaattcgacaaaatcacgcggcgtgttggtgccggaaagcgtggcataacgctggcgggcaaaaaggccgtgcagcgtatgaccaaattcatggaataaggttatgacatcatcccagagtaacaacgcaggctcaccggcagcgggtttctgataattgcagacgttataaattaccggatgtgttttattaagcgtactttgctcaacaaaattgcccatccatgcaccgccgcttttactatcacgggcgaagaaatcaccgtaaaataacgccagccccacgccattatgatcaaaaatttcccacacacgaacgtcaggatggtagacaggaatatcaaaacgttcgacaaacttaataccgaagagctgattcgcggtccagaatacaccttcatttaacaccgtgtttaattcaaaatatggcttgagctgcgcctcatcaagatcaaatttctcccgccgtacctgttccgcataaaatgcccagtcccacggctgcgcgctaaacccgccctgctgcttatcgataaccgcctgtatggaggctaattcatcgctcgcacgttgacgcgccgctggaacaatttcccgcataaagttaagtgctgcttcaggtgtttttgccatctgatcggcgattttccatgcggcataatgaggaaaaccaagtagtgttgcctgttgtgcacggatctccaccagacgttgaatgatagcgcgggtatcattggcatcatttttttccgctcgcgtccagcccgcaataaacagtttttcacgcgtcgcacgatcgcgcatttcggcaagcgccggttgttgggtggtattcagcagcggaatcagccatttgttatccagacctttctcgcgagccgcctctgccgccagcgcaatctcttgctcactcattcctgccagctgcgcgatatcgttcacaaccagaccgccggatttatttgctgccagtaatcgctggttaaactggctggtcagggtcgcagcttctgtattcagtacttttaattttgctttatcagcttgcgcaagtttggctccggcaaggacaaaacgttgatgaatcacctccaccaggcggatggattcactatcaagccccagggattcacggcgctgccagacagcatctacccgcgcgaataattcaccgttcagatagatatcattagccagttccgccagttcagcggaaaactgctcgtcaagacgctgtaattcatcattggtatgcgccgcagtcatcgcaaaaaagacgctggtaacgcgggtaagtaattctccgctttgttccagtgccagaatagtattgttgaaatcaggcatttgcgggttaagcgcgatggcagcaatttctgcccgcttttgctgcattccctcatcgaatgccgggcgatagtgatgattggcaatttgatcaaaatggggagccagatacggcagtgtgctttgcacaaggaaaggattcattgttgtcattttcttctcctgaacgcgaggtgttccatagcgtaggcttactgataacggagtgcaatcttgcaatccagtattacccgctcttaagcatcccgtgctatgttattgacacacaaaagcgttgaggaacagtgagaagcgcagtgcccagccatcccgatactgctgctttcaccaaatccttagtgcttctttcgtgtttttctattgtcataatggttatctctaaaaaagaggtaagatgcgtactacttactcgccgttattggtattattcagaaaaagtgagtaagactttgcagcaatgtttttgatcctgttcaaataaactaatggcatcagcaacatgctggaaatcaaacgtatgggtaattaatttttctggtttaattaaccctttacttaaccagtcgataacgatcgggaatttatttgcatttaagcgactagagaaaatagagagttcttttccggtaattccttgctgaatcacttcagacggttcactggagaaccccatcaatacaatacgtgccgctggagaagccagcgttacggcctctttcaggatagaaggatgacaagccgcatcgataattaatgtcggcttgatgcctttttcagtgaaaatctcgccaagcggtgtctggctgttattaatcgcccagtcagccccgctctctttcgctttttccagtcgttcatcaatgcgatcggcaacaatcacatttttaacgttatagacgccttttaatacctgaacgatcgtcaggccgattggaccggcaccataaaccagaacggtatcattttcagtcggttgaccatgtccggttacgttagccgcaatggtaaaaggttcgatcattaccgcatattgatcggccactgcttcaggaattttccacgcattttttgccggaaccacggcatattcactgaaaccaccgtcagcgtgcacacctaatacagccagtgtcgtacaaacgttcggtttacctatagagcacggatagcaatgcccacagctgaccaccggatcgacagcaacacgttcaccgactctggcgctttccacgccttcacccactgcatcaatgacgccaaagaattcatgaccaatgacgcgcggatatttcgcaaaaggattatgcccacgataaatatggctatcactaccacaaattccggcaagtttcacttttactcgtacttcacccgcactcggggtgggtatttcacgttcgacaatcgccagttgattcggtttttcaattaatatgcttttcattatcttactccttaccagttccacagcgtgccatcttccagacgtgcgactggtagataagcaggttcatagggatatttcgccgccagcttttcatcgaattcgataccaagacccggtttgtctcccggatgcatatagccgttatcgaaagtccagttgtgcgggaagacttcgagcatttgttcggaataacccatgtattcctggacaccgaaattggggacccacagatcaaagtgcagcgccgcagccatgcagactggactcaaatcggaaggaccgtgactgccagtacgtacctgatacaggctagcaaaatcggcaatccggcgcataccggtaattccgcctgcatgggtcagcgtggtgcggatataatcgatgagttgctcttcaatcagttgtttgcagtcccagatgctgttgaagacttcacccactgcgatgggtgtgacggtatgttggcgaatgagacggaagcattcctggttttccgcaggcgtcgggtcttccatccagaacatgcgataatcttcaatgcttttaccaaagcgcgccgcttcaataggcgttaagcgatggtgcatgtcatgcagcaaatgttcattaaaaccaaacttgttacgtaccgcgtcaaacaatttcggcatgaaatcgaggtatttctccgtgctccacagctgctcttccggccactgtcctttggttgcgggttcataagccagacctttacctttgctcatgccgtaggtggttttcataccagggattccgcactgcacgcggatggctttgaatccaagctcttgatgacgggcataatcatccagagcttcatcaatactgtgaccggtggtatggcaataaaccatcaccccttcacgagacgcgccgccgagtaactggtaaagcggcatgttggcagctttggctttaatatcccacagcgccatatcaaccgcactaatggcgctcatcgtaaccggaccgcgacgccagtaagcacctttatagaaaaactgccagatatcttcgatacggtgcgcatcgcgaccaataagctgcggacaaaggtgatcctgcaaataagaggccacggaaagctcacgtccattgagggtggcatccccaaggcccgtaataccgtcctcagtggtgatttttaatgtgacgaaattacgccccggacaggtaacaaaaacttcagcctttacgatcttcatgttcgattccttgcatcgcttgtcgtgatgcatgaaatctacgcaactgagctactaccatacaagtataaagatcgaaaaaagccggagtgatcacaaaaaaaggcgtatatttgcgctgtgaatggttgacaaaagatgaaatagaataccttttgtcagctgacacttcctcttatcttattgataaaatggatttatgttcttacgtgcgcccccagcccgcaacaatgatcaacatgccgcaaagcgcaatcaacgcacccgtccagtcataaagagtcagtttcacgccatccacaacgcgcagccacatcaacgccgtgcagacataaacgccaccataagccgcgtaaacacgcccactcgccgctggatgcaacgttaacaaccagacaaacagcgccagactaatccccgccggaagcaacagccagatactggcgtttcgttttaaccacaaccagggcagaaagcatccaataatttcacacagcgcagtagcaaaaaatagtaacgttgttttaatcatctttgtctcttattgacatcatgtatagttatagggcgacataatatcatcaatataaacaccctcctggtacgttttgcgtccgcagtggatggtgtagaatcacctttaatcattcatacagggaatgaattatgaaaatcactctcagcaaacgaatcggcctgctcgctattctgctgccttgcgcactggcattgagcacaactgttcatgccgaaactaacaaactggtgattgagtctggcgacagtgcacaaagccgccagcacgccgctatggaaaaagagcaatggaatgacacgcgcaatctgcgccagaaagtgaataaacgcactgaaaaagagtgggataaagccgacgccgcttttgataaccgcgataaatgtgagcaaagcgccaacatcaatgcctactgggagcccaatactttgcgctgcctggaccgtcgaactggccgcgttattaccccctaacctgttattgatttaaggaatgtaaggacacgttatgccaagcgcccacagtgttaagctacgcccgctggagcgtgaagatttacgctatgtacatcaactcgacaataacgccagtgtgatgcgttactggtttgaggaaccctacgaagcctttgttgaactctctgatctgtatgataagcatattcacgatcagagcgaacggcgctttgtggtggaatgtgacggcgaaaaagccggtctggtggagctggtggaaattaaccatgttcatcgccgcgcagaatttcagataattatctccccggagtatcaggggaaaggtctggcaacccgtgccgccaaattagcaatggactatggctttaccgttctcaatctctataagctgtatctgatcgttgataaagagaatgaaaaagcgattcacatttaccgcaagcttggctttagcgttgaaggtgaattgatgcacgagttctttattaatggtcaatatcgtaatgccattcgcatgtgtatattccagcatcagtatctggcagagcacaaaacaccgggtcagactctcctgaagccgaccgcacaataacattaataataatcgatcgtatttttgatggtgtaaacccgttcgacggcgggttttactccttcatcaacaatgattagctgacagtccaccggattagcgtgactgtcatattcacagctctgttttacattaccaacccgttgattattcagtaaagtaaccgctgtgtaatctaattttttgatcggatccgtacttggcgtggcgctgacagataatgttttgtcgttacttttcgtggttttacccagcggataaccctgatcatcatagcgatattccatctgcatttgtttgctgctggctttaatcacgaagccattatcatcggtttcccaactcaccccggcagaaggtaattctgctagctggcattttccctgtaaacgtactctcttctccagcgtctcggcatcacggtaataattggcgtccagtaccagagcgaccacggtattattttccagatccagtaattcgagactatcaaaacagccttcttcgctcaaagtcccagaaacacgtttcgtcacttcaccttgctcatccattaatgtctgagtgaaatcttttaccggaccacgcagcggatcaaaatcgaattcattagagaaactggccatctcaggggtaaaactaagtgttacctctgtgcggtcacatcctgtgaggaatatcgcgagtaagcatggtagtaatttgtatttcacaacagtcaccagagagtagagatgattctcaatcatagtagcaaatacagtactttacacgttaaatgctatgcttaaagaagttatcttcgcgtaaggagcttatgatgaaactcagtacctgctgtgccgcgcttctgctcgccctcgccagtcccgcggtactcgccgcgccgggatcctgtgagcgcatacagagcgatataagtcagcgcattatcaataatggcgtacccgaaagcagcttcacgttaagtattgtacccaatgaccaggttgatcagcctgattcccaggtcgtcggccattgcgctaatgatacgcataaaattctctatacccgcaccaccagcggtaacgtctctgctcccgcgcagtctagccaggatggcgcgcctgccgaaccgcagtaacacattatcgactgaacgccggatatgacaaatccggcgatttgaacatacaacataatcccaccttattactcatacccttctattgatatggattaataattcttaacccaaaatgggtagactccctctattgttagcgcgctaaatattcaatatataaacttttatataacgataaagaacagggagtgagttatgtccaaaaatgaacgaatggtgggcatcagccgcagaacactcgttaaatctaccgcgataggttctctggcgctggctgcaggcggtttttctttgccgtttaccctgcgcaatgcagcagcagcggtacaacaggcccgcgaaaaagtggtctggggtgcctgttccgtcaactgtggtagccgctgtgcacttcgtctacatgttaaagataatgaagtgacctgggtggaaactgacaataccggcagcgatgagtacggcaaccatcaggtacgcgcctgtttgcgcggtcgctccatccgccggcgtattaatcatcccgatcgcttgaattacccaatgaaacgcgtgggcaaacgcggcgaaggcaaattcgaacggattagctgggatgaagccctggatactatcgccagtagcctgaagaaaaccgtcgaacaatatggcaatgaggctgtatatattcagtactctagcgggatcgttggcggcaatatgacccgctctagcccaagtgccagcgcggtcaaacgcctgatgaactgctacggcggtagtctcaaccagtatggctcctacagcactgcgcaaatttcctgtgccatgccctacacctacggcagtaatgatggcaacagcaccacggatattgaaaacagcaagctggtcgtgatgtttggtaacaacccggcagaaacccgcatgagcggtggtggcatcacttatcttcttgaaaaagcgcgcgagaaaagcaacgccaaaatgattgttatcgatccgcgatataccgatacggctgccggtcgtgaagacgaatggctccctattcgcccgggcaccgatgccgcgctggttgcgggtattgcctgggtattgattaacgaaaatctcgttgatcaaccttttctcgataaatactgcgtcggctatgacgaaaaaaccttacccgcagatgcacccaaaaatggtcactataaagcctatattcttggtgaaggtgacgataaaacagcgaaaacgccgcagtgggctagccaaattaccggtatcccggaggaccgtatcatcaaactggcgcgtgaaattggcacagcaaaacccgcttatatctgccagggctgggggccacaacgccaggcaaacggcgaactgactgcacgcgctattgctatgttacctattttgacgggcaatgtcggcatcagcggcggaaatagtggcgcgcgtgaaagcacctataccattaccatagaacgcctgccggtgctggataatccggtcaaaacgagtatctcctgcttcagctggacagatgctatcgatcatggtccgcaaatgacggcaatccgcgacggcgtccgcggcaaagataaactggatgtgcccattaagttcatctggaactacgcgggaaataccctcgttaatcagcattctgacatcaacaaaacgcatgaaattctgcaggacgaaagcaaatgcgaaatgattgtggtcatcgaaaactttatgaccagtagcgcaaaatatgccgacattctgctgccagacctgatgaccgttgagcaggaagatattattcctaacgactacgccggtaacatgggatatctcattttcctccagcctgtcaccagcgaaaaattcgaacgcaaaccgatttactggatcctgagtgaagtcgcgaaacgtcttggacctgacgtctatcaaaagttcacagaaggtcgcacgcaggaacaatggttacaacatctgtacgccaaaatgcttgccaaagatccggcgttaccgtcttacgacgaactgaaaaaaatgggtatctataagcgtaaagatcccaatggccattttgtcgcctacaaagcatttcgtgacgaccccgaggcaaatccacttaaaacgccttccggtaagattgaaatttattccagcaggctggcggaaattgcccgtacctgggaactggaaaaagatgaagtgataagcccattgccagtttatgccagtacctttgaaggctggaactcccctgaacgtagaaccttcccactgcaactgtttggtttccattacaaatcccgtactcacagcacctacggcaatattgatctcctgaaggctgcctgccgtcaggaggtgtggatcaaccctatagatgcgcagaaacgtgggattgccaacggcgatatggtgcgggtgtttaaccatcgtggcgaagttcggctaccagccaaagtaacaccacgtattctccctggagttagcgctatgggccagggagcctggcacgaggccaatatgtctggcgataaaatcgaccatggcggctgtgtgaatacgctaaccactctgcgccctagtccactggcgaagggaaacccgcagcacactaatctggtcgagatcgaaaaaatataacccacgacaaccataaattctggcatgacattttgtttgaaaagcaataagtgagtaatgatgaaaatccataccacagaggcgctcatgaaggctgaaatcagccgtagaagtctgatgaaaacctccgcacttggcagtcttgcgctggcaagcagtgctttcactctgccattttcccaaatggtccgggcggcagaggctccggtagaagagaaagcggtctggagttcctgcaccgttaactgcgggagccgctgtctgttacgtttgcatgtgaaagatgacaccgtgtactgggtggagtctgatacgacaggtgacgacgtctacggtaatcatcaggttcgagcgtgtttacgcgggcgctctatccgccgacggatgaatcatcctgataggttgaaatatcccatgaagcgcgtcggcaagcgcggtgaaggtaaatttgaacggataagttgggacgaagccctggataccatcagtgataatcttcggcggatcctgaaagattacggcaatgaggctgtacatgtcctgtacggaacaggcgtagatggcggaaacatcaccaacagtaacgtcccgtaccgtctgatgaactcttgcggtggttttctcagtcgctatggcagctacagtaccgcacagatcagtgccgcaatgagttatatgttcggtgccaatgatggcaacagcccggatgatatcgccaatacgaaactggtcgttatgttcggaaataacccggcagaaacgcggatgagcggcggtggtgtcacttactacgtcgagcaagcccgcgaacgtagtaacgcacgcatgatcgtcatcgatccacgttataacgacactgctgccgggcgtgaagatgaatggctgcccattcgccctggcaccgatggcgcactggcctgtgcgattgcctgggtactgattactgaaaacatggtcgatcagccatttctcgacaaatattgtgttggttacgatgaaaaaacgctgcccgccaacgcaccacgtaacgcgcattataaagcctatattctgggcgaagggcctgacggcatagctaaaacgccggaatgggcagcaaaaatcaccagcatcccggcagaaaaaattatccagttggcacgagagatcggtagtgcaaaacctgcttatatttgtcagggttgggggccacaacgacattccaacggcgagcaaacatcccgcgctattgccatgctttccgttctcaccggcaacgtcggcataaacggcggcaacagtggcgtacgcgaaggtagctgggatctgggggtagaatggttcccgatgctcgagaatcctgttaaaacgcagatttccgtctttacatggacagatgccatcgaccatggtacggaaatgaccgcgacccgtgatggtgttcgtggaaaagaaaaactggatgtccccatcaagtttttatggtgctacgccagtaacacattgatcaatcaacatggcgacatcaatcacacccatgaggtgcttcaggatgacagcaagtgcgagatgattgttggcattgaccacttcatgacggccagcgctaagtattgcgatatcctgttgcccgacctgatgccaacagagcaagaagaccttatctctcatgaatctgcagggaatatgggctatgtgatcctcgcccaacccgcaaccagtgcaaaatttgaacgcaaacccatctactggatgctgagtgaagtcgccaaacgcttaggaccagacgtttatcaaacctttactgaaggtcgcagtcagcatgaatggatcaaatatctccatgcgaaaacgaaggaacgtaaccctgagatgcccgactacgaggagatgaaaacgaccgggatctttaagaaaaaatgcccggaagaacactacgtcgctttccgcgcattccgtgaagatccacaggcaaacccgttgaaaacacctagcgggaaaatcgaaatttattctgaacgactggcgaagattgcagatacctgggaattgaaaaaagatgaaattattcatccccttcctgcgtataccccaggttttgatggctgggacgatcccctgcggaaaacctatccactgcagttaacgggcttccattacaaagcgcgtacccactccagctacggcaatattgatgtgttacagcaggcctgcccacaagaggtgtggatcaaccccattgatgctcaggcacgcggtatccgtcatggcgataccgtgcgggtatttaacaataatggagaaatgctgattgccgcaaaagtgactccgcgtattctgcctggcgttaccgccatcgggcaaggtgcgtggcttaaagcggatatgtttggtgaccgggtcgatcacggcggcagtatcaatattctgacctctcaccgccctagtccgctggcaaagggaaacccgagccacagcaatcttgtccagatcgaaaaggtttaaggagtagcccatgaccacacaatatggattttttatcgattccagccgctgtactggctgtaaaacctgcgaactggcgtgcaaagattttaaagatcttggcccggaagtcagtttccgccgtatttatgaatacgctggcggcgactggcaggaagataatggcgtctggcaccagaacgtgttcgcttattatctctccatctcctgtaaccattgcgatgaccccgcatgtacaaaagtctgccccagcggcgcaatgcataagcgtgaagatggctttgtggtggttgatgaagatgtttgtatcggctgccgctactgccacatggcttgtccgtacggcgcgccacagtacaatgctgaaaaagggcacatgacgaagtgcgatggttgttatagccgcgtcgccgaggggaaacaacccatatgtgtcgaatcctgcccgctgcgtgcacttgagttcggtccaattgaagagctgcgccagaagcacggcactcttgctgccgtcgcgccactgccgcgcgcgcatttcacaaaacccaatatcgttatcaaacctaacgccaacagccgcccgaccggcgataccactggttatctggctaatccggaggaagtgtaaaatgggaaatggatggcatgagtggccactggttatctttaccgtattgggtcaatgcgtagtaggcgcgctgattgttagcggaattggctggttcgccgccaaaaatgacgcagaccgtcagcgtattgtccgtggcatgtttttcctctggctgttgatgggcgtcgggtttattgcctctgtcatgcacctgggaagcccactgcgggcgtttaactccctgaatcgaatcggagcttctggtctgagtaacgagattgctgccggttccatattttttgccgttggcggattatggtggctggtggcagtcatcggtaaaatgccgcaagcgttggggaaactctggttacttttcagcatggcgctcggcgtcattttcgtctggatgatgacctgcgtgtatcaaatcgacaccgtgccaacctggcataacggttacactacgctggctttcttcctgacggtattgttgagcggtccaatacttgctgccgcaattctgcgggcagctcgcgttacatttaataccacaccatttgccatcattagcgttctggcgctgatcgcttgtgccggggtgattgtgctgcaaggtttgtctctggcgtctattcacagttccgtgcaacaagccagcgcactggtaccagattacgcctccttacaggtctggcgtgtggtattgttatgcgcaggtcttggatgctggctttgcccgctcattcgtcgccgtgaacctcacgttgccggacttattctggggctaatcctcatacttggcggtgagatgatcgggcgtgtgctcttttatggcctgcacatgacagtaggaatggctattgcaggttaacaaattggtgcggggcaacccgcacatttcaggatgttaggaatgacccattttagtcagcaagataatttttctgtcgcggcgcgcgtgttgggcgcgctgttttattacgctccagagagtgcggaagccgcacctctggttgcggtactcaccagtgacggctgggaaactcagtggcctctaccagaagcgagtttagcgccgctggtgacggcttttcagacacagtgtgaagagactcacgcccaggcctggcagcgtttgtttgtcggcccgtgggcactgccgtctccgccgtgggggagcgtctggctggatcgcgaatctgtgctgtttggcgatagtacattggcacttcgtcagtggatgcgcgagaaaggcattcagtttgaaatgaagcaaaacgaaccggaagatcattttggtagtctgctgttgatggctgcgtggttggcggagaatggtcgccagacagaatgcgaagaattgctggcatggcacctttttccgtggagtacacgttttcttgatgtttttatcgaaaaagcagaacaccctttctaccgtgcactgggtgaactggctcgcttaacgctggcgcaatggcaaagtcaactgttaattcctgtcgcggttaaaccgctgtttcgataagatcaccgtaatattgccggatggtgacgattacgcgcaatccggcaataataggttacagtgtcacgtttttttatctcttaaagcacgcactgcttttgcggctggcctcttttgccgcaaaatagtcgcccgtgtttcattgcccatttctgctcatgcatcatctacacatctatccggatctgcgcactatgttccaccgtctgcttatcgcaacagtcgtcggtattctcgcggcctttgccgttgccgggtttcgtcatgcgatgctgctactggagtggttgttcctcaataatgactccggcagtctggtcaatgcagcgacaaacctttccccctggcgacggttgctaactccggcgctcggcggactggcggcgggtttgttgctgatgggctggcagaaatttacccaacaacgccctcatgcgccgaccgattatatggaagcgttgcaaaccgatggacagttcgattacgcagcaagcctggttaaaagccttgcctctctgctggtagtaaccagcggcagtgcaattggtcgcgaaggtgcgatgattcttttagctgcccttgccgcctcctgttttgcccaacgttttacgccacgccaggagtggaaattatggatcgcctgtggggccgcggcgggaatggctgcggcctatcgtgccccgcttgctggcagtttatttatagccgaagtgctgtttggcactatgatgttggcctctctcggcccggtgattatttccgccgtcgtggcattgctggttagcaatctgattaatcatagcgacgcgttactctacaacgtacaactcagtgtgacggttcaggctcgtgactatgcgctgattatcagtacaggtgtgctggcaggtctgtgcggaccactgttgttaacgttaatgaacgcctgtcatcgtggatttgtgagtctcaaacttgcgccgccctggcaactggcactaggcgggttgatcgtgggtctgctttccctgttcacacctgcagtgtggggcaacggctatagcaccgtacaatcctttttaaccgccccaccactgttaatgatcattgccgggatcttcctttgtaaactgtgtgccgtgctggcgagtagcggttccggcgcacccggtggggtctttacaccgacgctatttatcggtcttgccattggcatgttgtatggtcgtagcctgggattatggttccctgatggcgaagaaattacacttttactcggattgaccgggatggcgacactgttggcggcgaccacgcacgcgccgattatgagcacgttgatgatatgtgaaatgaccggggagtatcagctactccccggtttattgattgcctgcgtaattgcgagcgtaattagccggacgttacaccgtgactctatctaccgccagcacactgcgcagcatagctaagcggatgtattgccccagttcacgctgttcggcgcgcggcagataaggcagttcaccaatgagcggtgccggaagttttttacccagcacatcaatgatttccgcataatgcgccagtcctgggttgattcggttagccacccagccaatgagcggcagcccgtcgttggcgatcgcctgagctgttagcagtgcatggttaatgcaaccttcctgaataccgacaaccatcaacaccggcagttgttcctgcactacccattcagagagtggacgcaaatcattcatcagactgcgccagccgccagtcccttctaccacgacatgatcgactttttcggtcaggtttgccaggccgttactaatgagggtgtaattgattgggcaactgtgcgccacgctactttcttcttcgcttaacgcgataggattaactgcttcataaggcagttcgatggtactaacactctgcaacaccagggcatctttattacgcagcccttcgggtgtctctttgctccccttcgctacgggtttatatcccgcaaccgtttttccctgggaggctaacgcttgtagcaatgcgcgggaaaccaccgttttccctacagaagtgtctgtaccggtaataaagaaacgcttcagcatcactaactccaccgttatgcttcacaaatataaaccaggaaaataattaaccttgaaagtctaagttatgctttcctggcccaaattgagatagcgcaaattttggtagaacagttaaaaaatgttaaccctgcaacagacgaatcaacaaagaaccgttatacatcgcgtcttttaccagtgcagcgcctgccatcgtgccctggttagaaaactgagtactctcaacgctgatgtgctgactatacgcaggaagggcctgctgacggatgctgtcactgatgaccgggaagaggatatctgccgctttacttaacggactgccaatcagtattttttgtgggttaaataaattcaccatgatggcaagaatgcgcccgacatgcgcgcccaccccggtaatgatgtcttttgccagtagatcgccgcgcaatgccgcctgacacaaactgtccacggttaacggttgtccatgtaacatgctgctcatggattgattaagacgcagctgtgccagctcaagaatactgtccacgctggcgatggtttcgaggcagccgtgattcccgcaataacagcgtttcccatacgggtcgacctgtgtgtggcctatttccacgagactactgctgcctgcgtgtagcagatgaccatcggtaatgacgcccgcccccacgttgtgatcgataaccacctgaatcacatcgcgcgccccgcgactggcaccaaacaaggcctctgccatcgtccatgcgctgatatcatgctgaatataaaccggaacgccggtatgctgctccagcgcctcgccgagcggcatctcttttacatcctcgtagaacggcatgcgatgtacaataccattttccgtatcaataattcccggcaaggttatggcaatgctagttagacgctcaagttttttctggtggcggataaaaaactgatcgatatgggaaataatacgatccagcaatggcaagtcatcttttaacgccagttcctggctctcttccaccaccagtttgctgctcagatcgcgcagagcaaggaaaatctccccgcgactaatgcgcagagaaagatagtgccaggcttcagtttcaaccaccagccccaccgccggacggccacggttccccgcttctttgatttccagctcttgcaccaggtgtgcttcgagcatctcacggacaattttagtgatactggcaggagccagttgcgccagacgggaaagatcgatacggctgactggaccaagctgatcaatcaggcgataaaccgcgcccgcgttggtctgctttatttgatcaatgtgcccaggctggttttcagcaaccaccgcatactccctatattttcgcgctccgaaataatctgtaggctatggtgaagcacttcaatacgtgtcgtcaaatttttacttaggcatgtgattaacagcacatttttcgggctttttcgctgaaatttccctcacctgagagcattcagcagatgaatacgaaagttacgcgcagccggactttgttcatgatgtttcggccagaccaaccacatttcagaaaccgcatcctcttcagcaatcggcacccagcgcatttcgttgagctgaacacgtttaaaactcgcaggcaaaatactaacacccagaccggcggaaaccagaccgatgatggtcattgcctcgcccacctcctgagtgatgacgggcgtcaaatggtaacgtcgcatcagcccgagaatatcgtcatacagccctgtcccgacgtgcggatcaaaaaagacaaagggttctttcgccagttcagccagcgttacattcgggttatttgccaggggatgatcgtgcgggatcatcgccataagcggttcatggacgatgactgcgtgttcaaggctctccggtaacgctgtgttacgcagcaatcccatatccagcgttccttcaatgagcggagcgatttgctcgcgagtgttcatttcgcgggtttgtaaatggacatcaggataatcacggcgaaacaggcttaacgtatcggacaccgcccgaataaaaggagcgctgctagtaaaaccaatgcgcaactcccccgcttcaccctgatgcagcctttcagcgcgagcggcagcgtcatccaccatagacaggatttgccgactatctgcaagaaactgttttcctgctgccgtcagcaatacactgcgattggttcgtgccagcagtcgggcaccaatttgttgctccagcgcctgaatctgctgacttagcggcggttggctaatattcaggcgggcagcggcgcgcccgaaatgcagctcttccgcaacagcaacaaagtaacgcagatgacgaagttcaatattcatatttaaaacatcttatttgagattattaatatattagacagaacaattcgattttcctaccctatgtataagcctgatctacaggcatatttagcaaggatttcaagtgagccgtactacaactgttgatggcgctccggcaagcgacactgacaagcaaagcatttctcagccaaatcaatttattaaacgcggtacgccgcaatttatgcgcgtcaccctggcgctgttctctgccggactggcaacatttgcacttctctattgtgtgcagcctatccttccggtgcttagccaggagtttggcttaacccccgcgaacagtagtattagtctgtccatttccacggcgatgttggctattggtttgctgtttactggcccgctatccgatgccattggtcgcaaaccagtgatggtcacggcgctactgttggcctccatttgtacgttacttagcacaatgatgaccagctggcacggcattttgattatgcgcgccttgattgggcttagcttaagtggcgtggcagctgttggcatgacttatcttagcgaggaaatccatcccagtttcgtggcctttagtatggggttgtatatcagcggcaacagtattggcggcatgagcggacgcttaattagcggtgtcttcacggactttttcaactggcgaattgctctggcggcaatcggttgtttcgcgctggccagcgcgttgatgttctggaaaatcctccctgaaagtcgccattttcgcccgactagcctgcgccctaagacgttgtttatcaactttcgtctgcactggcgtgaccggggattaccgttattgttcgcagaaggctttttgctgatggggagcttcgtcacgctgtttaattacatcggctatcggttgatgctctccccctggcatgtcagtcaggccgtggttggcttattaagcctggcttatttgaccggtacatggagcagtcccaaagccggaaccatgaccacccgctatgggcgtggtccagtgatgttgtttagcacgggggttatgctgtttggtttactgatgaccttattcagcagcctgtggctgatctttgccggaatgttactcttcagtgcaggattcttcgcagcccacagtgtagccagcagctggatcggcccccgcgcaaaacgcgctaaaggccaggcctccagcctgtatctgttcagttactatctggggagcagtattgccgggacgctgggtggtgttttctggcataactatggctggaacggcgtcggcgcatttattgctctgatgctggtcattgctctgctggtcgggacgcgtttgcatcgtcgtctgcacgcctgaaaaataagtccggactgcggtaaatacccgtccggacttattgccagctcaaaccaacgttaatagccatcctaaaatagacgaagcgccagccaattcccgcagcgcgtctagcgtcatcaggattataagtacccaaataaacggattcattttgctgtgtgtcatttattactgatgcgcagttattctactgctttgtaagtagtaaaatagttaacccgatcaagactactattattggtagctaaatttcccttaagtcacaatacgttattatcaacgctgtaatttattcagcgtttgtacatatcgttacacgctgaaaccaaccactcacggaagtctgccattcccagggatatagttatttcaacggccccgcagtggggttaaatgaaaaaacaaattgagggtatgacaatgaaaaaagtattagctctggttgttgccgctgctatgggtctgtcttctgccgcctttgctgcagagactacgaccacacctgctccgactgcgacgaccaccaaagcagcgccggcgaaaactacacatcataaaaaacagcataaagcagcacctgcccagaaagcgcaggcggctaaaaagcatcataaaaatacgaaagctgaacagaaagcccctgaacaaaaagcgcaggcagcgaagaaacacgccaagaaacacagccatcagcaaccggcaaaacctgctgcacaacccgcagcgtaagttttcaacagtaatgctggcgcgccccctcgcgcctgaaaattacggtgctaagcgggtaacgtttagcaccgcctttagcggagggtagtatggtgggccgttatcgctttgagttcattctgatcatccttattttatgcgcactgattaccgcccgtttttatctttcctgattgtagttatctgattttactcccactttcatcccgtcccgtctatagtatttatgagggtttgcttttaataatcataattacccaccagagtgtgatatgcgtacaaccattgctgtagtgttgggtgcaattagtttgacgtctgcttttgtgtttgcagataaaccagacgttgccagaagcgcaaacgatgaggtcagcaccctgttttttggtcatgatgatcgtgtgccagtgaatgacacgacccaaagtccgtgggatgcggttgggcaactggaaacggccagcggcaatttatgtacggcgacgctgattgcacccaatctggcattaacggcaggacactgtttattgacacctccaaagggtaaagccgataaagcagtggcgctgcgttttgtgagtaataaaggtctttggcgctatgagatccacgacatagaaggccgcgttgatccgacactgggaaagcggttaaaagcagatggggatggttggattgtacctcccgcagccgcgccgtgggacttcggattgattgtgctacgtaatcccccttctggcattacgccgttgccgttatttgagggagataaagccgcgcttaccgccgcattaaaagcggcaggtcgtaaagtgactcaggcaggctaccctgaagatcatctcgatacgttgtacagtcatcaaaactgtgaagtgactggctgggcgcaaacgagcgtgatgagtcatcagtgcgataccttgccgggtgacagcggtagccctctgatgttgcataccgatgacggctggcaattaattggggtgcaaagtagcgctcctgccgcgaaagatcgctggcgcgccgataaccgggccatttctgttaccggttttcgcgacaagctggatcaactgagccaaaaataatgttcaaacgctgcccgacagcgcgggcagcgtcttcatcaggcaagtttcaccatgatcattccagccaacagcaagaccaggccaatccagcctttacgatttaaccgttgaccaaacaagatccaacctgcggctaacgtggcggcaataccaaacccgccccacaatgcataagcgacagacaagtcgatccctttaacggcttgagaaagcgcactaaaggcagccagcaccgccgccagggagagcaagccaaatattttgcgacgaaagccgtcagaaaatttcaaaaagacgttagcaacgatttccagcacgattgccaatgccagccaggcggcgtgaacccattcaaactgcgccatggttcacctccagttcaggtttacgcgctttacgggtaccactttttatcaacacaatcccggcgaccagggtggttaacccggcaattttcatcaggcttaaactttcgtcgaataacaaaacgctaaacaaggtaataaataaaataccgataccttcccacagcgcataagctacgcctaaggcgatttttttaacggcgaaagagagaaatatatagctcagagaaatcatcaccagcattaaaataaagccgccatttccctcactgacgctcgcccatttcatactcagcgtaccggtaatttctgtagcaatagccagacctaataaaatccaataaatatacattgtccttctcctgcaagagaattattttaattttcgcttaattcagcgaaaccaaagtaaagtggtcaagccccgcgcatagcgcaagctttggcagaagaaaggactaaagcgcgttgcgccagtgctgctcacctacgagcaagatagtggatgaggtacgaagatgggtaaatgtagaaaataacgtcctgaacaaattgtccataatattacaattatccgcagtgttgcttctcgtcatcgcggatgataattgtcctcggtagttgaacacgcctgatttgtatcatagcttaagaattaactcaaaatattttcacttctttacctgagcggtttgattttcgttatgatgacggagcgaaaaagacattattattagcaaaggaagaaaaaacggggacaagcatggcaaagccgatcatcacgctcaatggcctaaaaatcgtcattatgttgggaatgctggtcattattctctgcggtatccgttttgccgccgagatcatcgtgccgtttattctcgcattatttattgctgttattcttaacccgctggtgcaacacatggtccgctggcgtgtgccgcgtgtactggcggtgagcattttgatgaccatcatcgtgatggcgatggtgttgctattagcttatctgggttccgcgctcaacgagttgacgcggacgttaccgcaatatcgcaactctattatgacgccgctgcaagcgcttgaaccgttgttgcaacgcgtagggattgacgtcagtgttgaccagctggcgcattatattgatccgaacgcggcgatgacgttgctcaccaacttattgacgcagttatctaatgccatgagtagtatatttttattgctgctgacggtgctgtttatgctgctcgaagtgccacaattgcccggaaaatttcagcaaatgatggcgcgtccggttgaagggatggcggcgattcaacgtgcgattgacagtgtttctcattatctggtgctgaaaacagccatcagcatcatcaccggcctggtcgcctgggcgatgctcgccgcactcgatgttcgcttcgcttttgtctggggattgctggcctttgcgcttaattacatcccgaatattggtagtgtcctcgcggcaatcccccctatcgctcaggtactggtgtttaatggcttctacgaagcgttgctggtgctggcgggatatctgctgattaatctggtcttcggcaatattctggagccgcgtatcatggggcgtgggctggggctttccacattggtggtatttttgagcttgattttttggggatggttgttaggaccggtgggtatgctgctttccgtgccgttgacaattattgtcaaaattgcgcttgaacaaacagcgggaggtcaaagcatcgccgttctgttaagcgatctcaataaagagtgacggcctcagcagaggccgtcagggttacagagctttcaggattgcatccacgctggctttggcgtcaccaaacagcatgtgggtgttttccttgaagaacagcgggttttgcacaccagcatagccagtgttcatgctacgtttaaagacaatcacgttctgcgctttccacacttccagcacaggcataccagcaatcggactcttcggatcatcctgcgccgccgggttaaccgtatcgttagcaccaatcaccagtacggtatcggtatcagcaaagtcatcattgatctcgtccatttccagcacgatgtcatacggtacttttgcttcagccagcaatacgttcatatgtccaggcaaacgccccgcgaccgggtggataccgaaacgcacattaataccacgagcgcgcaatttctcagtaatttcagcgacaggatattgcgcctgcgcgactgccatgccgtaccccggagtaatgatcacactatgggagtttttcagcagttccgctgtctcttctgcggtgatttcgcggtgctcacccacttcctgatcatcgccagtagaagagccgtcggtgccgaaaccacccgcaataacgctgataaaggaacggttcatcgccttacacataatgtaagaaaggatagccccgctagaaccgaccagcgcaccggtcacaatcagcaggtcgttgctgagcataaagcccgcagccgcagccgcccagccggagtagctgttcagcatgctcaccaccactggcatatctgcaccaccgatggaggcgactaaatgccagccgaataccagcgcaattgcggtcattatcagcaatgccagcacttgcaggccgacgctgtccgtgcgaacaaatacaatcagcagcaggaaggaaacgaccagagccgccaggttcattttgtgacggtttggcagcatcaatggtttagagctaatcttgccacacagtttgccgaacgccaccacgctacccgtgaacgttaccgccccgatgaagataccgaggaacacttccgtcaggtgaatattgaccagaatcggtgccattcccgcgtcatgatgcagatagctgttaaagccaaccagcactgccgccagacccacgaagctatgcaggatcgccaccagttctggcatttcggtcatttcaactttcttcgccagacggataccaattgccccaccaatgaccatcgccagcaagatccagccaacattacccgtatccggtccaaaaatggttgcgattaacgcaatcgccatcccggcgataccgaagttgttaccctggcgagacgtttcatgtttgctaagaccggccagactgaagataaacaggatcgcggcaacaatgtatgcagctgtaactaatcctccagacatatgttaccccttaatttttgcggaacattttcagcatgcgctgagtcacggtgaagccaccgaaaatattaatgctggctataagcaccgcgataaaactaaggaagctaacccagccgccctggccaatctgcaacagtgctccgacaacaataatcccactaatcgcgttggtgacgctcatcaacggtgtatgcagcgcgtggcttacattccacaccacgtaataaccgacaacgcaggccagcgcgaaaacggtgaagtgcccaaggaattctttcggcgcaacgcttgccatccagccaaaaagaatgattgccagcgccatcaacgcgtatttacgccacggactgcaggtacatttttcctcagttttcacttccggtgccgctttttgtgccgcctgcggctgagcacttacctgaatcggcggtgccggccaggtaatttcgcccgcacggatcacggtcacgccgcgaatcaccacatcatcaaaatcaacagtgatattgccgtctttctctttgcacaacagtttcagcagattaacgaggtttgtgccgtaaagctgactggattgcgtcggcagacggcccggaagatcggtataaccaatcactttgacaccattttccgtagtgaagatttcacccggcacggtgtattcacagttgccgccgttttgggctgccaggtcgacaatcacactgcccgccttcatggagtcaaccatttcacgggtaattagcttcggcgctggtttgcctggaataagcgcggtggtgacaatgatatcgacctcttttgcctgggcggcaaagagttccatttccgctttgatgaacgcgtcgctcatcactttggcatagccatcgccgctgccagcttcctctttaaaatccagctcgaggaattccgcgcccatactttgaacttgttctttcacttccgggcgggtgtcgaatgcacgcacaatcgcgccgagactgtttgctgcgccaatggcggccagacctgcaacacccgcaccaatcaccatcacttttgccggtggcactttcccggccgcagtaatttgcccggtaaagaagcgcccaaattcatgtgccgcttcaacaatggcgcgataaccggcgatgttcgccatgctgcttagtgcgtccaggctttgtgcgcgactgatacgcggcacagagtccatcgccatcacggtcacgttacgttccgcaagtttttgcattaattccggattctgcgcaggccagataaaactcaccagcgttgtcccaggattcagtaacgcaatttcatcatctaacggcgcattgaccttcagaatgatctcactctgccagacgctattcccttctacaatttcagcgcccgcttgcacaaacgctttatcgtcaaaacttgccagttgacccgcgccgctctctaccgcgacggtaaaacccagtttcagcagctgttccactgtttttggcgttgctgcaacacgggtttcattggttaaccgttctcttggtatgccaattcgcatgatattcccttccatcggttttattgatgatggtttgcctgtgtcaggagccacacaagctgctcatgtacgagctaaatgttactccgttaaaataaattagtaacaaacgccctataacgtactgaaaattatgcctgtgatctagcgccaaaaatcagtatttcggcgtgaactcgcaaaatattaacgattcagccgtgatagtgggataaacaccttagaacgccggataaagactgataattgtcttcgacggtcgggtaaaacgagacatcgccccggcacgaatcactacttaacattaaattaacttatacaattcagttgcttcagtagtaatgatgctgatacggctgttttttaagcatagacggtcatttgagcaggattaaaattggcttaaggaatgtgatatgaaaaatgacgcagacagttacaccgtttaaatgcaataatcagccacgtttctcgttaataacaataccagtacctggtttgcgcaaggcgaaggattatttttatgaagcttaagaacaccctcctggcgagcgcactgctttctgctatggcattctccgttaacgcagcaacagaactgacaccggagcaagcggcagcggttaaaccttttgaccgtatagtggttaccggtcgttttaatgctattggcgaagcggtgaaagccgtttctcgtcgcgcagataaagaaggtgccgcctctttttatgttgtcgacacttctgattttggtaacagcggtaactggcgtgtggtcgctgacctctataaagccgatgctgaaaaagcagaagaaacaagtaatcgcgtaattaacggtgttgtcgaactgccgaaagatcaggctgttctgattgaaccgtttgacacggtcaccgtccagggcttctatcgtagccagccagaagtcaatgatgccatcaccaaagcggcaaaagcgaaaggtgcctactctttctacatcgttcgtcaaatcgatgccaaccagggcggcaaccagcgtattactgcattcatctataaaaaagatgctaagaaacgtatcgtccagagcccggatgtgatcccggcagattccgaagcaggacgtgcagctctggctgccggtggcgaagccgcgaagaaagttgagatcccgggtgttgcgactaccgcaagtccaagttctgaagtcggtcgcttctttgaaacccagagtagtaaaggcgggcgttacaccgtcacgctcccggatggcactaaagtcgaagaactgaacaaagcgaccgcagcgatgatggtcccgttcgacagcatcaaattctctggcaactacggcaacatgaccgaagtctcctatcaggttgcgaaacgtgccgcgaagaaaggtgctaagtattaccacatcacccgccagtggcaggaacgtggtaataacctgaccgtcagcgcagatctgtataaataactattcagttactcctataaggcggcttgatgccgcctttcgcatttttagtcacaaatttccccgcgaccattgcatgcagacacatctcttcgtaaaatcccgcgcttcagtggcaaactccatttttatgcgttttgccctaatatttattcttcttatcacgttttaatcactggatatcgatggaaaagaaactgggactgagcgcactcaccgcgctggtattaagcagtatgctgggcgcgggtgttttcagtctgccgcaaaatatggcggcagttgccagcccggcagcactgctcatcggctggggtattactggcgctggcattttattgctggcctttgccatgctgatcctcacgcgcattcgtcccgaacttgacggcggtatctttacctatgcccgcgaagggtttggcgagctaatcggcttttgttccgcatggggatactggctgtgcgcagtcatcgccaacgtctcctatctggtgatcgttttttccgcgttaagcttttttacggacacgccggaattgcgcctgtttggcgatggtaatacctggcaaagcatagtcggtgcaagcgctttattgtggattgttcactttttgatcctgcgcggggtgcaaaccgctgccagcattaacctggtggcgacactggcaaaattgttgccgctgggtctgtttgttgtgctggcgatgatgatgttcaaactggataccttcaagctcgacttcaccggacttgcacttggcgtacccgtttgggaacaggtgaaaaacaccatgctgatcaccctgtgggttttcattggtgtggaaggtgccgtggttgtttctgcgcgtgcgcgtaataaacgtgatgttggcaaagcgacactgctggcggttctctccgctctgggcgtttacttgctggtaacgctgcttagcctgggtgtggtggcacgtcctgaactggctgaaattcgtaacccgagtatggccggtctgatggtggaaatgatgggaccatggggcgaaatcatcatcgctgccggtttgatcgtttccgtttgcggcgcgtacttaagctggaccatcatggcagcagaagtaccgttcctggccgccactcataaagcattcccgcgcatttttgcgcgccagaacgcacaagctgcgccatccgccagtctgtggttgaccaacatctgcgtgcaaatttgtctggtactcatctggctgaccggttccgattacaacacgttgctgaccatcgccagtgaaatgattctggtgccctatttcctggtcggcgcgttcttgctgaaaatcgcaacccgtccactgcataaagcggtaggtgtcggtgcctgcatttatggcttatggttattgtacgcctctggtccaatgcacttgctgttatccgttgttctgtatgcaccggggctgctggttttcctgtacgcgcgcaaaacgcatacccatgataatgtactgaaccgtcaggaaatggtgctgattggcatgctgttaattgccagtgttccggcgacctggatgctggtgggataacgttcatcccatcgttggatagcaaaggagataacgatgggtaaaacccagcccttgccaatattaattactggcggaggtcgtcgcatcggcctcgccctcgcatggcatttcattaatcaaaagcaaccggtgattgtcagctatcggacacactatccagccattgatggactgattaatgcaggtgcgcagtgtattcaggctgattttagcaccaacgacggtgtgatggcgtttgccgatgaagtactaaaaagcacccatggtctgcgtgctattttgcataacgccagtgcgtggatggcggaaaaaccgggtgcgccactggccgacgtactggcttgcatgatgcagatccacgttaataccccatacctgctcaaccatgcgctggaaagattactgcgtgggcacggacacgccgccagcgatatcattcactttaccgattatgtggtggagcgcggtagcgacaaacatattgcgtatgctgcaagcaaagcggcactggataatatgacccgcagctttgcccgcaagctggcaccggaagtgaaagtgaattctattgcgccaagcctgatcctgtttaatgaacatgatgatgccgaatatcgacaacaggcgctgaataaaagtctgatgaaaaccgcgcctggcgagaaagaagtgatcgacctggtcgattacttacttaccagttgctttgtcaccggacgcagtttcccacttgatggcggtcgtcatctgcgttaatgcagctttatccagcatataatcaacacccatgcgcttatcccccaacacgcaacagaaccaacaaaagcggcgggcaagcgcatcattccggtgaaataccacaggctcaccaggtaaacaaaatagggaataatgctccacatactaaaaatgatggttgcgcgtaaggcttcaatgccgcgttcgctggcaacaatataatgcgcgataagcgcaaaggtcgggaaaagtggaatcagcccggcgatataataatttttcgtttttgctaaaacaccaatcaacagcactaccagcgcaccgagcgcggctttgattaccagccccatctttttaccttaacacttccataacaagtcatcagtagaatacctgatgaaaacttgtttagaaacgattgatagtaagtaaaaacagcgcggtgtattgtgacgtttttatatctaccgtgaatgttatgaacactatcgtatttgtggaagatgatgcggaagtcggtagtctgattgccgcgtacctggcaaaacatgatatgcaggttaccgtagagccgcgcggcgaccaggccgaagaaaccattttgcgagaaaatccggatttggtgttactcgacatcatgctaccaggcaaggacggcatgaccatttgtcgtgatttacgcgcaaagtggtctggaccgattgttcttctaacctctctcgatagcgatatgaaccacatcctggcactggaaatgggtgcctgcgactatattctcaaaacgacgccccctgctgttttgctagcgcgtttacgtttgcatttgcgtcagaatgagcaagccacactgaccaaaggtcttcaggaaacgtctctgactccctacaaagccctgcatttcggcacgttgaccatcgatcccatcaaccgcgtagtcaccctggctaacactgaaatcagcctcagcacagctgatttcgaattattgtgggaattagctacccatgccgggcaaatcatggaccgcgatgcattgctgaaaaatttacgcggcgtcagttatgacggactggatcgtagcgtggacgtggctattagccggttaagaaaaaaactgctcgataacgccgcagaaccttatcgcattaaaactgtgcgtaacaaaggctatctttttgcgcctcatgcatgggaataagcgatgaaaaaactgtttatccagttttacctgttattgtttgtctgcttccttgtgatgtctctgctggttgggctggtgtacaaatttaccgccgaacgcgcgggcaaacagagcctggatgatttgatgaacagtagcctgtatctgatgcgcagcgaattgcgtgagatccccccacacgactggggtaaaactctgaaagagatggatttaaatctctctttcgatctgcgtgtcgagccactgagtaaataccatcttgatgatatttccatgcaccgactgcgtggcggcgaaattgtcgccctggacgatcagtacacgtttttgcagcgtatcccgcgcagccactacgtgctggcagttggtcctgttccttatctttattatctccatcagatgcgattgctggatatcgccctgatcgcttttattgctatttccctcgcctttccggtgtttatctggatgcgtccgcactggcaggatatgttaaaactggaagcagcggcgcaacgatttggcgatgggcatctcaatgaacgtatccactttgatgagggtagcagctttgaacgacttggcgtcgcatttaaccagatggcggacaatatcaacgccttaattgccagcaaaaaacagcttattgacggtatcgctcacgaactgcgaacaccgttagtgcgcctgcgttatcgactggagatgagcgataacctgagcgccgccgaatcccaggcgttgaatcgtgatatcagtcaacttgaagctttaattgaagagctgctgacttatgcccgactcgatcgcccacaaaacgagcttcatcttagcgaaccagacctgccgttgtggctgagtacgcatctggcagatattcaggcagtaacgcccgataaaacggtacggataaaaacgctcgtgcaaggccattatgcggcgttggatatgcgcttaatggagcgcgtgctggataatttgctcaataacgccctgcggtactgccatagtacggttgaaaccagcctgctactgagcgggaatagagcgacattaattgttgaggatgatggcccagggattgccccagaaaaccgcgaacatatctttgaaccttttgttcgcctcgatcccagccgggatcgcagtaccggcggctgcgggctggggctggcaattgtccactctatagcactggcaatgggcggtacggttaattgtgacaccagcgaactgggtggtgcccgcttcagctttagctggccgttatggcataacatcccgcaatttacctctgcctgacactacgcgcacgatggtcaagtcaccacgactgtgctataaaataagtatgttgtaactaaagtggttaatattatggcgcgttacgatctcgtagaccgactcaacactacctttcgccagatggaacaagagctggccatatttgccgctcatcttgagcaacacaagctattggttgcccgcgtgttctctttgccggaggtaaaaaaagaggatgagcataatccgcttaatcgtattgaggtaaaacaacatctcggcaacgacgcgcagagcctggcgttgcgtcatttccgccatttatttattcaacaacagtccgaaaatcgcagcagcaaggccgctgtccgtctgcctggcgtgttgtgttaccaggtcgataaccttagccaagcagcgttggtcagtcatattcagcacatcaataaactcaagaccacgttcgagcatatcgtcacggttgaaagtgaactccccaccgcggcacgttttgaatgggtgcatcgtcatttgccggggctgatcacccttaatgcttaccgcacgctcaccgttctgcacgaccccgccactttacgctttggttgggctaataaacatatcattaagaatttacatcgtgatgaagtcctggcacagctggaaaaaagcctgaaaagtccacgcagtgtcgcaccgtggacgcgcgaggagtggcaaagaaaactggagcgagagtatcaggatatcgctgccctgccacagaacgcgaagttaaaaatcaaacgtccggtgaaggtgcagccgattgcccgcgtctggtacaaaggagatcaaaaacaagtccaacacgcctgccctacaccactgattgcactgattaatcgggataatggcgcgggcgtgccggacgttggtgagttgttaaattacgatgccgacaatgtgcagcaccgttataaacctcaggcgcagccgcttcgtttgatcattccacggctgcacctgtatgttgcagattaacgcccggctttcatactgccgaccatctgttctggccgtacccagctgtcaaactcggcttcgctaagataccccagcgcaagggccgcagcttttaaggtcagcccttctttatgcgcttttttggcgatctcggcggctttgtcataaccaatgtgggtgttaagcgcagtcaccagcatcaggctttcattgagtaattgattgattcgctcacgattcggttcaatacccactgcgcagtgtttgttaaaactttccatgccatctgccagcaagcgcacgctttgcaggaaattgtggatcaccattggacggaagacgttcagttcaaagttaccggaagcgccccccatgttgatcgccacgtcgttccccatcacctgacagcagagcatggttaatgcctcacactgtgttgggttcactttccccggcatgatactgctgcccggctcattttccgggatactgatttcaccaattccgcagcgcgggccagaggccagccagcggacatcattggcgattttcatcagactcgcagccaaccctttcaacgcgccgtgcgcctgaaccagggcatcacaggtcgccagcgcttcaaatttgttcggcgcggtaacaaacggtgcacaggtaatgactgccagttcatctgctacgcgacgcgcatactccggatgggtatttagtccagtacccaccgctgtaccgccaagagccagttccgctacgtgaggcaggctgtattcgatatgtttgagattatgctcgagcatcgctacccagccggaaatctcctgccccagcgttaacggcgtggcatcctgcaagtgagtacgaccaattttgacgatatcggcaaaagcacgggatttctcattcagtgtctgtgtcagggttttaagctgaggaatgagttgcttgcgcagcgccagcagcgccgcaacgtgcatcgccgtcggaaagacatcgttggaactttggcttttgttcacgtcgtcgttagggtgaactttacgttccatcccgcgcacaccgccgagtaattcactggcccggttagccagcacttcgttcatgttcatgttactttgcgtgccggagccggtctgccagatagccagcgggaattcgtcgtcatgctgtcctgccagtacttcatccgccgcctgacgaatggcgctcgctttctcttcagacaacaagcctaaatcttcattaacttttgccgctgcacgcttggttagcgccagcgcatgaatcagactggtgggcattttctccgtgctaatgcggaaatgctccaggctgcgttgagtttgtgcgccccacagcttatctgccgggacatcaatcgcccccatgctatctttttcgctgcgtactgtattcatgacctgctcctcacctgattaattttttctttctgttttgctttcgttaagcaacttttagctcacttattatttaccatttgataacaaatgtttggtctttcgtgccatgtaaaaaaaccgccccgaagggcggctctgtttatttcacacagcgggtgcattgtgtgagttgtatctgctggaagaagtcatttcctttatcatccacaaggataaacgccgggaaatcttccacttcaattttccagatggcttccattcccagttccggatattcaacacattccaggctcttaatacttccctgcgccaatacagcggccggaccaccgatactgccaaggtagaagccgccgtgttttttacaggcatccgtcacctgctggctgcggttgcctttcgccagcatgatcatacttccgccctgcgcttgcagttgatcgacataagaatccatccgtccggcggtcgttgggccaagagaaccggaggcataaccttccggcgttttggccggacccgcgtagtaaatcggatgatctttgatgtactgcggcagcccttcaccgttatccatccgctctttcagtttggcgtgagcaatatcacgaccgacgataatcgtgccgttaaggcttaagcgtgtagaaacgggatactggctcaactgtgcgaggatctctttcatcggacggttaaggtcaacgcgcaccgcttcgccttctcccgctttgcgcagctcttccgggatatatttgcctggattatgttccagtttttcgatccagatcccctgacggttgatcttcgctttgatattacggtcagcagagcaggagacgcccataccgaccgggcaggatgcgccgtgacgtggcaggcgaatcacgcggatgtcgtgagcgaagtatttaccaccaaactgcgcacccagaccaagattttgcgcttcgatcagcaattctttttccagttccacatcgcggaacgcctgaccgtgctcattcccttccgttggcagttcatcatagtatttcgcggaagccagtttcaccgttttaaggttcgtttctgcagaagttccaccaataacgaacgcaatatgatacggaggacaggccgccgtacccagcgtgcgcatcttctcaaccaggtaatttttcagtttccccggcgtcagtaacgctttggtttcctgatagagatacgtcttgtttgcgctaccaccacctttggcgatacagaggaatttgtattcgtcgccatcaacggcataaagatcgatctgcgctggcagattggtgccggtattcacttctttatacatatccagcggcgcgttttggctgtagcgcagattatcttcgatataagtgttatagacaccgcgcgccagcgccgcttcatcaccaccaccggtccatacacgctgcccttttttaccaacaataatcgcggtgccggtatcctgacaggttggcagaacgcctttcgccgcgatgtcggagttacgcaggaattgcagcgccacatatttatcattttcgctggcctccgggtcacgcagaatgtcggccacctgttgttggtgcgccggacgcagcatgaagctcgcatcatgaaacgcctggcgcgccaacagagttaacgcttcgggtgcgactttcaaaatctcctgcccttcaaattcagatacgctaacgtgttcgctggttagcaggtaatactcagtatcatcttttttgagtggaaaaggagcctgataatgaaagggtttgttactcattgttctctcacttactgcctggtttggttatgctctgggcgggtgttccgttgccctgttaaaagcgagtaacaatatcctacacacttttttaacaaaaactgagactagtacgactttttgcggctccaggttacttcccgtaggattcttgctttaatagtgggattaatttccacattaaaacagggattgatcatgcaaaaactcattaacagtgtgcaaaactatgcctggggcagcaaaacggcgttgactgaactttatggtatggaaaatccgtccagccagccgatggccgagctgtggatgggcgcacatccgaaaagcagtagtcgagtgcagaatgccgccggagatatcgttagtctgcgtgatgtgattgagagtgataaaagcactctgctcggagaggccgttgccaaacgctttggcgaactgcctttcctgttcaaagtattatgcgcagcacagccactctccattcaggttcatccaaacaaacacaattctgaaatcggttttgccaaagaaaatgccgcaggtatcccgatggatgccgccgagcgtaactataaagatcctaaccacaagccggagctggtttttgcgctgacgcctttccttgcgatgaacgcgtttcgtgaattttccgagattgtctccctactccagccggtcgcaggtgcacatccggcgattgctcactttttacaacagcctgatgccgaacgtttaagcgaactgttcgccagcctgttgaatatgcagggtgaagaaaaatcccgcgcgctggcgattttaaaaagcgccctcgatagccagcagggtgaaccgtggcaaacgattcgtttaatttctgaattttacccggaagacagcggtctgttctccccgctattgctgaatgtggtgaaattgaaccctggcgaagcgatgttcctgttcgctgaaacaccgcacgcttacctgcaaggcgtggcgctggaagtgatggcaaactccgataacgtgctgcgtgcgggtctgacgcctaaatacattgatattccggaactggttgccaatgtgaaattcgaagccaaaccggctaaccagttgttgacccagccggtgaaacaaggtgcagaactggacttcccgattccagtggatgattttgccttcagcctgcatgaccttagtgataaagaaaccaccattagccagcagagtgccgccattttgttctgcgtcgaaggcgatgcaacgttgtggaaaggttctcagcagttacagcttaaaccgggtgaaagtgcgtttattgccgccaacgaaagtccggtgactgtcaaaggccacggccgtttagcgcgtgtttacaacaagctgtaagagcttactgaaaaaattaacatctcttgctaagcttattaaaggcttataacaccttcaggcggccagtccgcctgatttcattttatggataatcattatgaataaaagcctggtagcggtaggcgtcattgttgcgctaggcgtagtctggacaggcggcgcatggtatacaggcaagaagattgaaacccatctcgaagacatggtcgcgcaggcgaacgcgcaactcaaactgacagctcctgaatccaacctggaagtgagttatcaaaactatcatcgcggcgtattcagcagccagttgcaactgttggtgaaacccattgccgggaaagaaaatccgtggattaaaagcggtcagagcgtcatcttcaacgaaagcgttgatcatggtcccttcccgcttgcccagcttaaaaaactgaacctgatcccgagcatggcaagtattcaaaccacgctggttaataacgaagtaagcaaaccactgtttgatatggcaaaaggtgaaacgccttttgagattaacagccgcattggttacagcggtgattccagttccgatattagcctcaagccactgaattacgagcaaaaggatgaaaaagtcgcctttagcggcggcgagttccagttaaatgctgacagagacggcaaagccatctccctttccggggaggcgcaaagtggtcggatagacgcagttaacgaatacaaccagaaagtgcagttgacctttaataatctgaaaaccgacggttccagcacgctggcaagttttggtgagcgtgtaggaaatcaaaaactgagtctggaaaaaatgaccattagtgtggaaggcaaagaactggcactgctggaaggcatggagatcagcggtaaaagcgatctggtcaatgacggtaaaacgatcaatagccaactggattacagcctaaacagcctgaaggtacagaatcaggatctgggcagcggcaagctgactttaaaagtcggccagattgatggtgaagcctggcatcagtttagccagcaatataacgcgcaaactcaggcgctgctggcacagccagaaattgccaacaaccccgaactttatcaggagaaagtgacggaagccttctttagcgccctgccgctgatgctgaaaggcgatccggtgattactatcgcgccgctaagctggaaaaacagtcagggtgaaagtgccctgaatctgagcctgttcctgaaagatccggcaacgactaaagaagcgccgcaaacgctggcgcaggaagtagatcgtagcgttaaatctctggatgcgaaactgaccattccggtggatatggcaactgagtttatgactcaggtagcgaagctggaaggttatcaggaagatcaagcgaaaaaactggcgaaacagcaagttgaaggtgcaagtgcaatggggcagatgttccgtctgaccaccttgcaggacaataccatcaccaccagcctgcaatatgctaacggtcagataacgttaaatgggcagaaaatgagcttagaagattttgttggcatgtttgcgatgccagctcttaacgttccggctgtaccggcaattccgcagcagtaattcacggccaaaacgccggagaattttcactccggcgttttcatctgaaaacaaaccagagattgcctgatgcgctacgcttatcaggcctaccttttcctgcaacactttgaatttatgagtttttgtaggctggataaggcgtttacgccgcatccggcataaaaaacgcgcactttgtcaacaatctgaaacgccggagatttttctctccggcgttattttttacttcagcataaagtcatactgaatactcattttcacatcccagtaattcaggcgatcgcccagcgtactgccatcgcgcttttcccgccctttatcggcagcaagaaagaaattcatcccttgtaacggcccttcgctgacccgatagttcataccacctaagatacccgtgccttcaatccgcacatctcgtttactggattcatagccgcgagtcacaatcggtgcaaatgtcagcgtaaattgcggcgttaaacgatagttgacgcccaattgccaggactgcattccttcacggttacgatcaagacttaaactaaagggatagccaatgtcggtatccaccacggcaccattcattgcatggcgcaaataaccaccactgccaaatacacttccccacggcgcattccaggtcaattgtccactaaccaacgccgtttcattgggctggctggtattacgacttaaaccttcgagctgcgcgtaaaagccgagcaactcccctttcaacgtataattcgggtcgagcggtatgcttttctcgagaatactttgtatctgattggaaacatctttctgtacgcttgcccccagagaatagcgactggtatcatcatgccaactggcggctaaaaaagaacgtgcgcgatgtttatcgtattttcccgtctggctgttatacaccccttcatcacgaataccggttgtactatcagtccataaaaatactcgactacgccacattccccacagatcaatatttggtgttaaagcccaataacctaatgctccttcagaaactgtcggtaatgtacgttggctactgccagccattaacggaatacgataaggtaagctaccataactataatccgtcccgaagcgacctaatttaagcaggctattttcactgggttttatttttactgcccccagggcaaagccaaaacttttatcaccatcaagataccaccgggtactcatatcagcacgagcacctaatttataaacataatacgccccgccttcaacgccaataatattggaataataaccactattgaaatcgagcaatcctccctgtacccatgcgtaaatatctcttcccgcgccagcactgggcttatccgccctgcgcaattcgtttttcagtctgatgcgtagtcccgcttcatcgtcagccagttgcgccgcataagcagaggtaaggccagaggcagccgtcaggcaaataacggccatggccactatttttctcatagttgcacctttgatgttctgattatttttattgaatattaattagtgatatcgctgattaattgctgctgcacttttttacgattatcaatttcaaccacgatttctttgaattttttatccgtgagcggataaaaccagataataacgaatgccagtagcataaatccgcaaggtactaaggcaatacttgtgcggatgcccataataacttccggcgtttgcacctgattggcgatatatccgcttaaccccaaaataaaggcaggaatactacctccgattgcctgaccgcatttacgggtaaaactgaatagactataggtgagcccttcaattcgcacgccggtcaggtattcaccgtattctacggtatcagcttccagcgcccacatcacggtcatggtaacgccctgaccaatactagcgatggccaacgcaaccaacgccaccggcagactccagacggaaacccagaagaacagcagataaccgcaggttcccagcaaagcgccaatcaggaaggtattctttttaccgatcctcgcgaccatccccggcaccagcggtgcgcttgccacagtaccaaccaggttttgcaccagtaccagcacagtgaacagcccggtatcatttaacacatagcgcacgtagaacaagctgctggcgctgaccgcaaaggtgctaatcagcacacacagcgcaccgatgcacaacataaacagcgggcgattccgtttcagggtttgcagactgatattcaaactcggctgcgcaacgatacgtaccacattctcacgcgtgcttttgaagcagatgaagtaaagcaccattccggcaatcgccagcacaattgtccagaaatggtatacgctcaccatctcttccgggctggagttcttaatgctcggtcctatcagaaatgccaggcagacaaaggtcaaactagcggcaatcccacgagccgcgcccagacgggcgcgggattgtggttgttgggtcatcgcggtagcaagactaccataaggaatattcaccaggctgtagcaaagcccgaggcccatgtaggtcaaatatgcatacaccactttgctaccatggctccagtcggtcagcacccagaataccagcacgctgaagatcattaacggcgcagtaccgaagagtaaaaacgggcggaattttccccagcgggtattcacactgtccaccactcgtccggcaaagacgtcggcgaaggcatcgaatacccgcaccagtaacagcatggtgcccgccgcagcggcaccgacgccagcgacgtcggtgtagtaactcaacaggaagagcgcccccattgcgaaggcgaagttattggcgacgtcaccgaggctgtagccgacgatggtgcgccaggagagttgttgattcattgtttgcctccctgctgcggtttttcaccgaagttcatgccagtccagcgtttttgcagcagaaaagccgcgctcttcggtttgcggtcgcgagtgaagatccctttcttgttaccgccaacgcgcaatatgccttggctggtcgcaaaatcggcgaaattccatacctgttcaccgacgacggcgctgacgcgatcaaagacgcggtgatacatatccagccatgcacactgatactcttcactccacatgtcggtgtacatactgtgcagcccggctaacgtatccacgccgtattcggtgatgataatcggctgatgcagtttctcctgccaggccagaagttctttttccagtaccttctctgccgtttccaaatcgccgctttggacataccatccgtaataacggttcaggcacagcacatcaaagagatcgctgatggtatcggtgtgagcgtcgcagaacattacattgacgcaggtgatcggacgcgtcgggtcgagtttacgcgttgcttccgccagtggcgcgaaatattcccgtgcaccttgcggacgggtatccggttcgttggcaatactccacatcaccacgcttgggtggtttttgtcacgcgctatcagctctttaatcgcctgtaagtgcgcttgctgagtttccccgttgactgcctcttcgctgtacagttctttcggcttgttgcccgcttcgaaaccaatgcctaaagagaggttaaagccgacagcagcagtttcatcaatcaccacgatgccatgttcatctgcccagtcgagcatctcttcagcgtaagggtaatggctggtacggtaggagttggccccaatccagtccattaatgcgtggtcgtgcaccatcagcacgttatcgaatcctttgccacgcaagtccgcatcttcatgacgaccaaagccagtaaagtagaacggtttgtggttaatcaggaactgttcgcccttcactgccacactccggatgccgacgcgaagcgggtagatatcacactctgtctggcttttggctgtgacgcacagttcatagagataaccttcacccggttgccagaggtgcggattcaccacttgcaaagtcccgctagtgccttgtccagttgcaaccacctgttgatccgcatcacgcagttcaacgctgacatcaccattggccaccacctgccagtcaacagacgcgtggttacagtcttgcgcgacatgcgtcaccacggtgatatcgtccacccaggtgttcggcgtggtgtagagcattacgctgcgatggatcccggcatagttaaagaaatcatggaagtaagactgctttttcttgccgttttcgtcggtaatcaccattcccggcgggatagtctgccagttcagttcgttgttcacacaaacggtgatacgtacacttttcccggcaataacatacggcgtgacatcggcttcaaatggcgtatagccgccctgatgctccatcacttcctgattattgacccacactttgccgtaatgagtgaccgcatcgaaacgcagcacgatacgctggcctgcccaacctttcggtataaagacttcgcgctgataccagacgttgcccgcataattacgaatatctgcatcggcgaactgatcgttaaaactgcctggcacagcaattgcccggctttcttgtaacgcgctttcccaccaacgctgatcaattccacagttttcgcgatccagactgaatgcccacaggccgtcgagttttttgatttcacgggttggggtttctacaggacgtaacataagggactcctcattaagataataatactggtcaacctttaatctgattagttaaccaattctgtgttgcacacagttatctgtgagaaacccatggaagagaaatggaaataaaaagaactgacaccgcgatcaaaaaaccaaaaactgcaatacccacagcgtgatatagatcgcattaatctttaaaacagcgttgacagaagccataaaataagcaaccgaacgttcgttcgagcgtattgggaacgataaactctcatgacatatggctacagtgaatattttggggggaattctccgaagccgggaaggataatttttgcacagagaaattacgatatgaaacgcgggcacagttatcaccagcccgccgaaaaagagagagaatcaggatgcggttaagataccgccaatcatcgcgcgtaatccctgagcaaagctcgcttcacgcgccaggtcttccgcttcgatatcggccagtacaccgtaggtcagatccagcagtaaacgactagtcattgccgtgttgatgtctgggcttatctcgcctttttgctgggcatcacgcatccgctgggcaacaaattccgtgatcgtcatatgcttatttttaagcatggcggcgacctgtgggttacgcatcccttccgccataatttcaaccaccagcgcccgttgtccaaaggcttcatgggtgagagagacaatggactcgaccatatagtcaacgaaatgaatcccttcaatcggttcccggaaacgggccagcgccctctcctggtcctgtaagataatcgcctgaatcaaggcttctttggagatgaaatggtgatagagcgtcccgggactaatggcgcaagatttacagatggctttcatgctggcactgtgaaatccattttcactaaaaatctctctggcagcattgaggatccgggtccgtgtcggttgtgcttcagtctgcatgttatccatcattaaaccattatagttagcgtgaataactagtttaccgcgttgtcaggtgagcgcctatcattgctgttgaatagtgcgaaggcacactctattcgtatacttttcactctgaaattggttaaccaatagccgtgatttggctgccagttatttagcagagacgttgatgagtttatcccggtaaacaacacgcacggttgtttaccggtccgttagtgtattaattgagctcctgtaccccaccaccggagacggtgagaatttgtccgcttacccagctcgcagcagggctgcaaaggaacagcgctgcgttagcaatatcttgcggttggcccagacgtctgatcggcgtgtgctgtaacattttttgttcaatttctggtgtaataacggatttcagggcatcggttaatattgcccccggcgcaatgccatttacccgaatatttttttcacccaggtcaaacgccatatttctgaccagatgactggccgcagctttagaacttgcataggaagtcatgtttatatttttattttctgccgccatagaagtgatggtcagaataacgccaccgccatttttttccatttctggcgcaacaagttgactcagatggaaaaaagaaaacacattcagttcataagcacggcgaaaatccgccattggcatatcaaacggtttaggtccaccgccaccggcgttgttaaccagaatatcaactttacccagcttactgatagcaaagtctgccagtgcagagagttcctgttcggaagtaatatcacaacggcaggcaaatgcctgaccacccagttgttgaatttcgtctacaacatggttagctgcgtcggcgttaatatcactgaccaccacagatgcgccagctgtcgcgaatgtaatggcgatttctttaccaatacctgcacccgcacctgtgatgatggcgcattttccgtcgagtctcaggttgtcagaattaaacacataaacctcctgtgaacttcagtaaaaataaaaggcaccgcctgtgtgccacattttttatcattaaccttgaggaaaggacactaccaggtatagcagataaagagaggattatttcgctgcaatgagccgggcgggaataataagattgcgactatgcgtctcttcatgggtgattttttgcatcatgcgatccgcaagtgtgataccaagttcccgcgctggcgtgctggcccaggtaacaggtatatcatcaagtgtggttggtgtcgcatcggtaaatgccgccaggctaacctgttgctcaaagtaacgatcgactccgctttccccgctttgccgccctgctttgagcaaaccaaaccatgcccccatcgcaatagtttcgttatagcaaaccacggcactgatggtcgggttatgacgtaaaagcgccgtgatagcttccgcggcttgcttctggctggaagtgcactccaacacccaatcgctatgaaacggcaggccaaattttagtagagttgcacaatagcccccaacccgttctgcacgggttaaactggaactttgccctcccagccaggcgatccgctgatgcccattgcgaatgagatgctccgtcaacaactgtgcagcctgcatgttgtccgggcgaaccgtatcaacatcatcaagataactggcacgggaagcgaaaatcaccgggatagctttttcttctgccatccgtcgcaggtcatcgctacttcctgcagctccggcaattaccacaccatcgacaccctgattcagtaacagactaaaccgctgtgccagctgctcaccgtctttaccgccgtgaagcaaaaaaaccatccgtccctgcgcttccagagcttccgtcaatccggccgtcaattcggcgtaaaacggcgcagataaatcacggacgatcaaaccaatgacgccgctttgcccgccgcgcagcgcgctcgcctggcgattgcgcacaaatcccagctcttcaatggcggcgttaacgcgttctcctgtggcggtagagattcgccctttgccactaagcaccaggctaacggtacttacgctcacgcccgcagccagcgcaacatcatgaatggttatttttttggcggtagccatgcagatgacctactccctgattatgtgacagataaaacgttttaccttttatttatcttatacccgctattatcgttgcgtaatgtgatttatgcctcactaaaatttgataaaacgttttatcttctcgcgcaatttactgaatccagattgttctctacgaggagtcgttttatgacggcgaaaacagcaccgaaagtcacgctgtgggagttcttccagcagttaggcaaaaccttcatgttacccgtggcattattgagcttctgcggcattatgctcggcattggtagttctcttagcagccatgatgtcataaccctgatcccggtcctgggcaaccccgtgttgcaggctatctttacctggatgagtaagattggcagctttgcttttagtttcctgcctgtcatgttctgtatcgccatcccgctgggcctggcacgcgaaaataaaggcgtagcggcattcgctggcttcatcggttatgcggtaatgaacctcgcggtaaacttctggttgaccaataaaggcattctgccaaccacggatgccgcggttctgaaagccaataacatccagagcattcttgggatccagagcatcgataccgggatcctcggtgcggtgatcgccggtattatcgtctggatgctgcatgagcgtttccataatatccgcctgccggatgcgctggcattcttcggcggtacgcgcttcgtaccaattatctccagcctggtgatgggccttgtcggcctggtgattccattagtctggccgattttcgccatgggtattagcggcttgggccatatgataaacagcgcgggtgatttcggaccgatgctgtttggtaccggtgaacgtctgctgttgccgtttggtctgcatcacattctggtggcattaattcgctttaccgacgcaggcggcacgcaggaagtctgcggtcaaaccgtcagcggcgcactgaccatcttccaggcgcaattgagttgcccgaccactcacggtttttctgaaagcgccacgcgtttccttagccaaggtaaaatgcctgcgtttctcggcggtctgccaggtgcagcgttagctatgtatcactgcgcgcgcccggaaaatcgccataaaattaaaggtctgctgatttctggcctgatcgcctgcgtcgttggcggcactaccgaaccgctggaattcctgttcctgttcgtagcgccagttctgtatgtcatccacgcgctgttaaccggcctcggcttcaccgtcatgtctgtgctcggcgtcaccatcggtaataccgacggcaatatcatcgacttcgtggtgttcggtattttgcatggtctgagtaccaagtggtacatggtgccagtggtggcggcaatctggtttgtcgtttactacgtcatcttccgtttcgctatcacccgcttcaatctgaaaaccccggggcgcgatagcgaagttgccagcagtatcgaaaaagccgttgccggtgcgccgggtaaaagtggttacaacgttcctgcaatcctcgaagcattaggcggtgccgacaatattgtcagcctcgataactgcattacccgtctgcgtttgtctgtgaaagatatgagccttgttaatgtgcaggcactgaaggacaatcgggcaattggcgtagtacaacttaatcaacataacctgcaggttgttatcgggccacaagttcagagtgtaaaagatgaaatggccggtctgatgcatactgtccaggcataaggataagatatgttcgattttagtaaggtcgtggatcgtcatggcacatggtgtacacagtgggattatgtcgctgaccgtttcggcactgctgacctgttaccgttcacgattagtgacatggattttgccactgccccctgcattatcgaggcgctgaatcagcgcctgatgcacggcgtatttggctacagccgctggaaaaacgatgagtttctcgcggctattgcccactggttttccacccagcattacaccgccatcgattctcagacggtggtgtatggcccttctgtcatctatatggttagtaaactgattcgtcagtggtctgaaacaggtgaaggcgtggtgatccacacacccgcctatgacgcattttacaaggccattgaaggtaaccagcgcacagtaatgcccgttgctttagagaagcaggctgatggttggttttgcgatatgggcaagttggaagccgtgttggcgaaaccagaatgtaaaattatgctcctgtgtagcccacagaatcctaccgggaaagtgtggacgtgcgatgagctggagatcatggctgacctgtgcgagcgtcatggtgtgcgggttatttccgatgaaatccatatggatatggtttggggcgagcagccgcatattccctggagtaatgtggctcgcggagactgggcgttgctaacgagcggcagcaaaagtttcaatattcccgccctgaccggtgcttacgggattatagaaaatagcagtagccgcgatgcctatttaagcgcactgaaaggccgtgatgggctttcttcccctagcgtactggcgttaactgcccatatcgccgcctatcagcaaggcgcgccgtggctggatgccttacgcatctatctgaaagataacctgacgtatatcgcagataaaatgaacgccgcgtttcctgaactcaactggcagatcccacaatccacttatctggcatggcttgatttacgtccgttgaatattgacgacaacgcgttgcaaaaagcacttatcgaacaagaaaaagtcgcgatcatgccggggtatacctacggtgaagaaggtcgtggttttgtccgtctcaatgccggctgcccacgtagcaaactggaaaaaggtgtggctggattaattaacgccatccgcgctgttcgttaaccccaattgcgcaacgtaaaaaatcgttgcgcaatcgtggatttttaccctgctttgtttttataatggtgcgcacttttatatccagaaaaagagtgcgaccatgattgataccaccctgccattaactgatatccatcgccaccttgatggcaacattcgtccccagaccattcttgaacttggccgccagtataatatcagccttcctgcacaatccctggaaacactgattccccacgttcaggtcattgccaacgaacccgatctggtgagctttctgaccaaacttgactggggcgttaaagttctcgcctctcttgatgcctgtcgccgcgtggcatttgaaaacattgaagatgcagcccgtcacggcctgcactatgtcgagctgcgttttagtccaggctacatggcaatggcacatcagctgcctgtagcgggtgttgtcgaagcggtgatcgatggcgtacgtgaaggttgccgcacctttggtgtgcaggcgaagcttatcggcattatgagccggaccttcggcgaagccgcctgtcagcaagagctggaggcctttttagcccaccgtgaccagattaccgcacttgatttagccggtgatgaacttggtttcccgggaagtctgttcctttctcacttcaaccgcgcgcgtgatgcgggctggcatattaccgtccatgcaggcgaagctgccgggccggaaagcatctggcaggcgattcgtgaactgggtgcggagcgtattggacatggcgtaaaagccattgaagatcgggcgctgatggattttctcgccgagcaacaaattggtattgaatcctgtctgacctccaatattcagaccagcaccgtagcagagctggctgcacatccgctgaaaacgttccttgagcatggcattcgtgccagcattaacactgacgatcccggcgtacagggagtggatatcattcacgaatataccgttgccgcgccagctgctgggttatcccgcgagcaaatccgccaggcacagattaatggtctggaaatggctttcctcagcgctgaggaaaaacgcgcactgcgagaaaaagtcgccgcgaagtaacaaaatggatggtgcaaatgcaccatccatttttcatgcaaggcacaaagtcgcgcgatgtttggcggattcgatgcccagctcaatcaactccattacctggattgcctggcttgccggaaccggattttcaccatcgccatttaacgcatcacgaatagccgcatagtaagccggataattcccaggcaccgtcaacagcgtttcttcgacacgttcctcaccttccacgcgggtaagtacgccatcacgcatatcgtagccccagtcttcctgcggtagacgctcgccatttttcagacgttcttcctgtggatcgaggccatatttcacataactgcctcgggatccatgcacgatataccgtgcactctcagcggctgccagcatggtaccgtgtaaaatgactcgccgctgtggataggacaagatggcgtggaaataatcggtgctctgcgctccgggccgtaactgtgccaaatctaccgtcatgctgaccggtaaaccaaaaagcgtaatggcctgatcaagaagatgtggtgctaaatcgtaccagataccgctgcctgggccgccctgttcacgccaacgatcgcgcacctgcggacggaagcggtcaaaatgagactcaaagtaagcaacttcacccagcacgccttccgcgagtaaaccttttagcgtcaagaaatcgctatcccagcgacggttatggaatacagacagcacacgccccaggctttttgccagcgcatccagctctcgcgcttgactcagtgtcacggtaaagggtttatcaacgaccacatgtttacccgcctcaagcgccgctttggctaacgggaaatgggtatcgttgggtgtaggaatgacaatcaggtctatgttgggatcgttaaacagatgcttcggctcagagacaaccgtaaccgttggccagtcggcttttacttttgtttcatcactgctggagattaccgccagttcctgcccgggcgtgcccgcaatcaggggcgcatggaaggttttgctcgcataaccatacccaatcaacccaacacggatgttgtcgctcatgtcattgcctctcattgaagtatgatggctatttgacactatcctttacccacgctcaacagtttaataacctgccagcaataagggatgttgtttaacttaagtcaaaaaaatagcgaattttccaacgacaaaagctaaatatcgcaaaaacctcagtaaaaatcttgctggagctattattgctaagtaacatttaccccctgaagttaatggatcaatcaagagagatgtgggctgtaatgaatcgtcttattgaattaacaggttggatcgttcttgtcgttagtgtcattcttcttggcgtggcgagtcacattgacaactatcagccacctgaacagagtgctagcgtacaacacaagtaagctctgcacttgtggagcgacatgctgcccgtccgggtgcatgttttcacttgtcggatattaaaccaggaatttattatcttgttcgatgttgttggtgattgtcagggatagtaaagcgcgttactcttttcagagcagtttttcatccctgaatatttgccatcagcgcattcttattattgtaataacacaagcgttcacttttggtgaaattttatcatcactaataatacctacccctttggtattaattattttatggaccttttatgactgttcaggactacttattaaaatttcgcaaaatcagtagtctcgaaagtctggaaaaactctacgaccatcttaattacaccctgacggacgatcaggaactgatcaatatgtatcgtgctgccgatcaccgtcgcgcagagctggtttctggcgggcgtttgtttgacctcggccaggtaccgaagtccgtctggcactatgtccaataaagaaagtagcgatcggttataaaagccttataataacgcccctaaaattagatttgcctgtttgcgtcgctattctggagaacctatgaccaccacaacgccacaacgtattggaggctggttgcttggcccgttggcctggcttttagtcgctctgttgagtacgacgctggcgttgttgctgtataccgctgcgttatcttctccgcaaacatttcaaacgctcggcggacaagcactgacgacacaaatcttatggggcgtttcttttattaccgctatcgccttgtggtattacacactgtggttgaccatcgctttctttaaacgtcggcgttgtgttcctaaacactatattatctggctgcttatttccgtattgctggcagtaaaagcattcgcttttagtcccgtggaagatggcatagccgttcgccagttgctgtttactttgttggcaaccgcattgatcgtcccctatttcaaacgcagcagccgggtaaaagcgacgtttgtgaatccgtaataaccttacagttaacctgttgtcgcctgctctggattaacggataataggcggcttttttatttcaggccgaaaaatgactgactacctgttactgtttgtcggaactgtactggtcaataactttgtactggtcaagtttctcggtctctgtccgtttatgggggtttccaaaaaactggaaaccgcgatgggcatggggctggcaacaacgtttgtgatgacgctggcgtctatttgcgcctggcttatcgatacgtggattttgatcccacttaatctgatttacctgcgcaccctggcatttattctggtgattgctgtggtcgtgcagttcaccgagatggtggtgcgcaaaaccagcccggtgctttaccgtctgctggggatttttttgccgcttatcaccaccaactgtgcagtgctcggcgtggcgttgctgaatatcaatctcgggcacaatttcttgcagagcgcgctgtacggtttttccgccgctgtcggtttcagcctggtgatggtgctcttcgccgccatccgcgaacgccttgctgtggctgatgtcccggcaccttttcgcggtaatgccattgcgttaattaccgcaggtcttatgtctctggcctttatgggctttagtggtttggtgaagttgtaatgaatgctatctggattgccgttgccgccgtgagcctgctgggcctggcgtttggcgccattctgggttatgcctcccgccgttttgcggtggaagacgatccggtcgttgagaaaattgacgaaatcttaccgcagagccagtgtggtcagtgcggttatcccggctgtcgcccctacgcggaagccatcagctgtaacggtgaaaaaatcaaccgttgcgccccaggtggcgaagctgtgatgctaaaaattgccgagttgcttaatgtcgagccgcagccgctggatggcgaagcgcaagagataacgcctgcgcggatggtggcggttattgatgaaaataactgtattggctgcactaaatgtattcaggcgtgtccggtagacgccatcgttggcgctacccgtgccatgcatacggtaatgagtgatctctgtacgggctgcaatttatgtgttgatccgtgcccgacgcactgcatcagcttgcaaccggtcgcagaaacacctgactcctggaaatgggatctgaacaccattcccgtgcgtatcattcccgtggaacaccatgcttaagttattctctgcattcagaaaaaataaaatctgggatttcaacggcggcatccatccaccggagatgaaaacccagtccaacggtacacccctgcgccaggtacccctggcgcagcgttttgttattccactgaaacagcatattggcgctgaaggtgagttgtgcgttagcgtcggcgataaagtattgcgcggccagccgcttacccgtggtcgcggcaaaatgctgcctgttcacgcgcccaccagcggtaccgttacggctattgcgccccactctacggctcatcctagtgctttagctgaattaagcgtgattattgatgccgatggtgaagactgctggatcccgcgcgacggctgggccgattatcgcactcgcagtcgcgaagagttaatcgagcgcatacatcagtttggtgttgccgggctgggcggtgcaggattcccgacaggcgttaaattgcagggtggcggagataagattgaaacgttgattatcaacgcggctgagtgcgagccgtacattaccgccgatgaccgtttgatgcaggattgcgcggctcaggtcgtagagggtattcgcattcttgcgcatattctgcagccacgcgaaattcttatcggcattgaagataacaaaccgcaggcgatttccatgctgcgcgcggtgctggcggactctaacgatatttctctgcgggtgattccaaccaaatatccttctggcggtgctaaacaattaacctacattctgaccgggaagcaggttccacatggcgggcgtagttccgatatcggcgtattaatgcaaaacgtcggcactgcttatgcagtgaaacgtgccgttattgatggcgagccgattaccgagcgtgttgtaaccctgactggcgaagcaatcgctcgcccgggcaacgtctgggcacggctggggacgccagtgcgtcatttattgaatgatgccggattctgcccctctgccgatcaaatggtgattatgggtggcccgctaatgggctttaccttgccatggctggatgtcccggtcgtaaagattaccaactgtctgttggctccctctgccaatgaacttggcgaaccacaggaagaacaaagctgcatccggtgtagcgcctgtgctgacgcctgccctgcggatcttttgccgcaacagttgtactggttcagcaaaggtcagcaacacgataaagctaccacgcataacattgctgattgcattgaatgtggggcttgcgcgtgggtttgcccgagcaatattcccctggtgcaatatttccgtcaggaaaaagctgaaattgcggctattcgtcaggaagaaaagcgcgccgcagaagccaaagcgcgtttcgaagcgcgccaggctcgtctggagcgcgaaaaagcggctcgccttgaacgacataagagcgcagccgttcaacctgcagccaaagataaagatgcgattgctgccgctctggcgcgggtgaaagagaaacaggcccaggctacacagcctattgtgattaaagcgggcgaacgcccggataacagtgcaattattgcagcacgggaagcccgtaaagcgcaagccagagcgaaacaggcagaactgcagcaaactaacgacgcagcaaccgttgctgatccacgtaaaactgccgttgaagcagctatcgcccgcgccaaagcgcgcaagctggaacagcaacaggctaatgcggaaccagaacaacaggtcgatccgcgcaaagccgccgtcgaagccgctattgcccgtgccaaagcgcgcaagctggaacagcaacaggctaatgcggaaccagaagaacaggtcgatccgcgcaaagccgccgtcgaagccgctattgcccgtgccaaagcacgcaagctggaacagcaacaggctaatgccgagccagaacaacaggtcgatccgcgcaaagccgccgtcgaagccgctattgcccgagccaaagcgcgcaaacgggaacagcaaccggctaatgcggagccagaagaacaggttgatccgcgcaaagctgccgtcgaagcggctattgcacgcgccaaagcacgcaagctggaacagcaacaggctaatgcggtaccagaagaacaggttgatccgcgcaaagcggcagttgccgcggctattgcccgcgctcaggccaaaaaagccgcccagcagaaggttgtaaacgaggactaaatggtattcagaatagctagctccccttatacccataaccagcgccagacaagccgcattatgctgttggtgttgctcgcagccgtgccaggaatcgcagcgcaactgtggttttttggttggggtactctcgttcagatcctgttggcaagcgttagtgctctgttagccgaagctctcgtactcaaactacgcaagcagagcgtagccgcagcgttgaaagataacagtgcattgctgacaggcttattgctggcggtaagtattccccccctcgcgccatggtggatggtcgtgctgggtacggtgtttgcggtgatcatcgctaaacagttgtatggcggtctgggacaaaacccgtttaatccggcaatgattggttatgtggtcttactgatctccttccccgtgcagatgaccagctggttaccgccacatgaaattgcggtcaacatccctggttttatcgacgccatccaggttatttttagcggtcataccgccagtggtggtgatatgaacacactacgcttaggtattgatggcattagtcaggcgacaccgctggatacatttaaaacctctgtccgtgccggtcatagcgttgaacagattatgcaatatccgatctacagcggtattctggcgggcgctggttggcaatgggtaaatctcgcctggctggctggcggcgtatggttgctatggcagaaagcgattcgctggcatattcccctcagcttcttagtaacgctggcgttatgcgcaatgttgggctggttgttcagtccagaaacactggcagcaccgcaaattcatctgctgtctggagcgaccatgctcggcgcattctttattttgactgacccggttaccgcttctacgaccaatcgtggtcgtcttattttcggcgcgcttgcgggcttattagtctggttgatccgcagtttcggcggctatcctgacggcgtggcttttgccgtcctgctggcgaacatcacggttcctctgatcgattactacacgcgtccgcgcgtctacggccatcgcaaagggtaaaccatgctgaaaactatccgaaaacacggcattacgttggcgctatttgcagcgggtagtacagggttaactgcggccatcaaccagatgaccaaaacgacgattgctgaacaggccagtctgcaacaaaaggcgttatttgatcaggtgctgccagccgaacgctataacaatgcgctggcacagagttgctatctggtaactgcgccagagttaggtaaaggtgagcatcgggtttacatcgccaaacaggatgacaaaccggcagccgccgttctggaagcaaccgcgccagatggctattccggtgcgattcagctgctggtgggagccgattttaacggcacggtacttggcacgcgcgtgacagagcaccacgaaacgccagggcttggcgataaaatcgaactgcgcctttctgactggatcacccattttgcgggtaaaaaaatcagtggtgcagatgatgcgcactgggcggtgaagaaagatggtggtgatttcgaccagttcaccggcgcgacgattactccccgcgcggtggttaatgcggtaaaacgcgccggattgtacgctcagacgttaccggcacaactttctcaacttcctgcctgtggagaataaagcgtgagcgaaattaaagacgttattgttcaggggttgtggaaaaacaactctgcgctggtccagttgctcggcctttgtcctctgttggcggtcacgtccactgccactaacgctctgggtttaggacttgcgactacgctggtactgacgctgaccaacctgaccattagcacgctgcgtcactggacgccagccgagatccgcattcccatttacgtgatgatcatcgccagcgtggtcagcgctgtacagatgctgatcaacgcctacgcctttggcctgtatcaaagtttagggatttttattccgctgattgtcactaactgtatcgttgtgggccgcgctgaagccttcgccgccaaaaaaggtccggcgcttagcgcactggacggctttagtattggtatgggcgcaacctgcgccatgttcgtgctgggtagtctacgcgaaattatcggcaatggcacattgtttgacggtgcagatgcgctgttaggtagctgggcaaaagtattacgcgtggagattttccacaccgactcccctttcctgctggcgatgctgccaccaggtgcatttattggcctgggactgatgctggcaggaaaatacctgattgatgaaagaatgaaaaagcgccgtgctgaagcagctgcagaacgtgcattgccaaacggtgaaacagggaatgtctgatgaataaagcaaaacgcctggagatcctcactcgcctgcgtgagaacaatcctcatcccaccaccgagcttaatttcagtagcccttttgaattgctgattgccgtactgctttccgctcaggcgaccgatgtcagtgttaataaggcgacggcgaaactctacccggtggcgaatacgcctgcagcgatgcttgaactgggcgttgaaggggtgaaaacctatatcaaaacgattgggctttataacagcaaagcagaaaatatcatcaaaacctgccgtatcttgctggagcagcataatggcgaggttccggaagatcgtgctgcgcttgaagccctgcccggcgtaggtcgtaaaacagccaacgtcgtattaaacactgcattcggctggccgactattgctgtcgacacgcacattttccgcgtttgtaatcgtactcaatttgcgccggggaaaaacgtcgaacaggtagaagaaaagctactgaaagtggttccagcagagtttaaagtcgactgccaccattggttgatcctgcacgggcgttatacctgcattgcccgcaagccccgctgtggctcttgtattattgaagatctttgtgaatacaaagagaaagttgacatctgaagaaaaggggtaacaccgattaccccattgataacctttctttatcctcttttaaaacatctttttaacgtcaatgatgccattgcttagcgttatcatcaggtaatccgtttgcggataaccaaaaatgcaggttaattgtttttttaatagcgaaattttctattcattcgtgatcaagatcacgatgctgtcgcaatgtaaaaacattgcaagaatcaggttaaatcatttaaatttacacacgcaacaaatattgacctacaaaacattacactggctatttttcagaaactggactatctcactagtaaaaacgctaaatagcagaacatatcgccgttaagccatcacccccctctcagtgcagtgaaaaaatctgccgttacgttttttgaaaaatttaacgctggataacatttcccggaatggttgaattccccgcctcagttatatgtaacagattattacaaaggacttgtctgaaagtgcaagatagtgaacattacctgccgtttcccctcccactataacaattgcgcgtatgttttttatacataacgcgagaaagcacccccgttaatatgggatgtaaaaaaagaggtaaaagtgtccactgcaaaccaaaaaccaactgaaagcgtcagtttgaacgctttcaaacaaccgaaggcgttctatctcatcttcagcattgagttatgggaacgttttggttattacggcctacaaggaattatggctgtttacctggttaaacaactgggtatgtctgaagcggatagtatcacccttttctcttcctttagtgccctggtttatggtctggtcgctatcggcggctggttaggtgacaaggtactgggtactaaacgcgtaattatgctcggcgctattgtgctggcgattggttatgctctggttgcctggtctggtcacgacgccggtatcgtttatatgggtatggcggctattgcggtcggtaacggcctgtttaaagctaacccgtcttctctgctttctacatgctatgagaaaaacgacccgcgtctggacggtgcattcaccatgtactacatgtccgtcaacatcggctctttcttctctatgattgctacgccgtggctggccgcgaaatacggctggagtgttgcgtttgcgttgagcgttgtaggcctgctgatcactatcgttaacttcgccttctgccaacgctgggttaaacagtacggtagtaaaccagacttcgagcctatcaactaccgtaacctgctgctgaccattattggtgttgtggcactgatcgctatcgccacctggctgctgcacaatcaggaagttgcgcgtatggcgctgggcgttgttgccttcggtatcgtggttatcttcggtaaagaagccttcgcgatgaaaggtgctgcgcgtcgtaaaatgatcgttgccttcatcctgatgctcgaagccattatcttcttcgtgctgtacagccagatgccaacgagtctgaacttctttgcgattcgtaacgttgagcactccattctgggtctggccgtagaacctgagcagtatcaggcactgaacccgttctggatcatcatcggtagtccgattctggccgctatctataacaagatgggcgataccctgccgatgccaaccaagtttgcaatcggcatggtgatgtgttctggtgcgttcctgattctgccgctgggtgcgaaattcgcgtctgacgctggtatcgtgtctgtaagctggctggtcgcaagctatggcctgcagagcatcggggaactgatgatctctggtctgggtctggcaatggttgctcaactcgttccgcagcgtctgatgggcttcattatgggtagctggttcctgaccactgccggtgcaaacctgattggtggttatgttgcgggtatgatggctgtgccggataacgttaccgatccgctgatgagtctggaagtctatggtcgcgtattcttgcagattggtgtcgctactgccgttattgcagtactgatgctgctgaccgcgccgaaactgcaccgcatgacgcaggatgacgctgcagacaaagcggcgaaagcagccgtagcgtaaaattcagggaaactcttttacaagccgctaacttttcgttagcggctttttttttgttcagcaacgcactaccatactttaaaccacagacaaaaggagttaccgatgaaattgttctacaaaccgggtgcctgctctctcgcttcccatatcaccctgcgtgagagcggaaaggattttaccctcgtcagtgtggatttaatgaaaaaacgtctcgaaaacggtgacgattactttgccgttaaccctaaggggcaggtgcctgcattgctgctggatgacggtactttgctgacggaaggcgtagcgattatgcagtatcttgccgacagcgtccccgaccgccagttgctggcaccggtaaacagtatttcccgctataaaaccatcgaatggctgaattacatcgccaccgagctgcataaaggtttcacacctctgtttcgccctgatacaccggaagagtacaaaccgacagttcgcgcgcagctggagaagaagctgcaatatgtgaacgaggcactgaaggatgagcactggatctgcgggcaaagatttacaattgctgatgcctatctgtttacggttctgcgctgggcatacgcggtgaaactgaatctggaagggttagagcacattgcagcatttatgcaacgtatggctgaacgtccggaagtacaagacgcgctgagtgcggaaggcttaaagtaatagccatcggcccacaggtcgttgtgggccgaaatgagatatttcagagctttgttgcgctgaagtaatgttctggtttggcaatacgatcctgagcagccaccacttgcagctcatattcctgcattgctttggtggtcaccatgatttcgtagactgcagcggtcacatgttccagcgcctcctgcagcgttgccccctgaagcagtttcaccagcagtaaaccgctcgtcacatcaccaacacctaccggctggcgcataccaaaatccaccagcggacggctgatatgccaggcttcatcggcggtgaccagcagcatttcaaaacggtcacggctgtagccagctcgcgccaggtgtttaaccaacacaatttgtggcccttgcgcaatgagttcgcgcgctgccagaaccgcttcttcgacgttatttaccgcatgctcacagagtatttccagctcaaccagatttggcgcaatgatatcgctggcaggcaaaccgtgccgcacatgaaactctgcgacacccggtgcaacgatacagcctttttccggatgacccattaccggatcgcaaaaatatttcgcctgcggattcgcggctttcacctgacggacgataccgaggatatgttcaccctgctccgcgcttcccagatagccacttaatacggcatcacaggtgtgtaatttatcaatggcggcaatgccttgcacaatttcggttaaatggctgggcggcatcacgcagccagtccatttgccgtattgggtgtgattagaaaattgaacggtgttcagcggccagacgttcgcgcccaggcggcgcatcggaaactctgccgcactgttacccgcatgaccataaacaacgtgagactggatagcgagaatatttttcatcatgttccctgtataaaaaccagggggagtgatttctcactccccctttccacttaatgcattatttccagcaaatcagacagtaattctttttaccgcgacgcagtaaggtaaaacgaccaaacagacgatcttcttctttaaagaagtattcaggatcggactgtttttcaccgttaatggtgatggcattggaggcgatagttttacgtgcctgaccacgggaaggttgcagttcagaatcgaccagtgcctgcatcaggtctgcgcccttttccatctcaaccatcggtacgccgtcctgcgccagctgttcgaagtccgcttcactcagcgcactcaaagaaccgctgaacaggcattcggtaatacgttttgccgcctgtaaaccttcttcaccgtgaaccagacgagtcacctgctccgccagtacatactgggcgcgcggtgctttaccgctgtttttatcttcttcttccagggcgttgatctcttcaatgctcataaaggtgaagaacttcaggaagcggtaaacgtcggcatccgcagtgttgatccagaactggtagaatttgtacgggctggttttcttcggatccaaccagactgcgccgccttcagttttaccaaatttggtgccatctgctttagtgatcagcggaacggtcaggccaaacacctgattctgatgcagacgacgggtcaggtcgataccagaagtgatgttaccccactggtcagaaccaccaatttgcagcaccacaccgtactgtttgttcagacaggcgaagtcataaccctgcaacaggttgtaggaaaactcagtgaagctaatcccctgatcttcacggttgagacgctgcttaaccgcttctttgttgatcatctggttaacggagaagtgtttgccaatatcgcgcaggaaggtcagcacattcatattgccgaaccagtcatagttgttcgccgcgatagcagagttttctccacagtcgaaatcgaggaacggggcaacctgcttacggattttgtccacccactcctgaacagtttcttcggtgttcagcttacgctcggcagctttgaagctcgggtcgccaatcagacccgtcgcgccgcctaccagcgcaaccggcttgtggcccgcctgctggaagcgtttcaggcataacaatggaacaagatgccccaaatgcaagctgtcagcggtaggatcgaagccgcaatagagcgcgatcgggccttgcgccagtcgctctgctaacgcttcctcgtccgtcacctgggctaccagcccccgctcttgcaattgtttaatcaagttactgcttgccatcaaaatctccatgtatataacgactgcacctttgccggtacacgacttttcgccagatgcgaaagagacatagaataaagtgccagaatcaggagtaccagcgattaaagcaagatttttgcatcttttcagggtgcaagacgatcaatcttccacgcatcattttcacgctggtacaaaaagcggtcatgcaggcgatgctcaccaccctgccagaactcaatctgttcaaggctgacgcgaaaaccgccccaaaagctcggcaatggcacttcgccctgttgaaacttctgcttcagctccaggaatttactttcaaggataccgcgggcagaaatgcgactggactgcttgctaacccatgcaccaatctggctatcacgcgggcggctatgaaaatatttcatcacttcgagagtgctaagtcgttctgctttaccgatcaccatcacctggcgctcaagggtatgccacgggaacagcaggctaacgcgcggattattttcgatttgatgtgctttacggctgccgaggttggtgtaaaacaccatgcctttttcgtcgtaatgtttgagtaaaacgatgcgctgataaggctgaccatgttcatccacggtagcgaccaccatcgcggtagggtccgccagtttggcttcacaagcctgagagagccaacgttcaaaaagggttaatggatcggcgggaagatcgcggcggcgtaacccgcctttggtgtattcacggcgcagatgcgcgatttgctgcaattcgtcgttatcagacatggttttctttacggattgtcagtgggtgacgctattgtgcgccgcccctggaaaaatctcaacgctgtggattttgtaactgacagttattcaagacgatgcggtcgcgtttatagacagtcgcttcatcgcctttgctccagaaaacatagattccgtcagtgtaacgcgcgccagaggcactaatgccctgtttgagatgcagtagttgattatcgtaaacaaaactgacctcctggcgcggattattcagtttgaccgtcaacggtttttcatcacactggtattccagcgtatcggtttgcatgcgctcaaccagctgattaaaggcgctacagccggagagaaggaccggcaaaatgataattaacagttttttcatagtcatatcccgaagactttcctggtctggagggcaatacgccctccctaacgttccaagtgtaacggcagacgcggtaagaaaaattcagttaactctgatatcacgggttagcggggaaaatagcccccagtaccgtctcctggcttgcgccagtgacggaaggcagatttcctggtaatcccgccagcgtccgccaggcaagccaggcgaaagccaatgcttccatgtcatcgccactaatgccaacggcatcggtggtggtgacttctgtgcctggcagtaatgccgccagacgcgccatgagtagcggattacgactacctccaccacataccatcaatcgttcgcagccaccgctcaacaaaacttgttcagaaatggtcacggcggtgagttctgccagtgtcgcctgcacatctcggggatcaacacccggaaaatggcgcaaatggcgctccagccaaccatagttaaagtattcgcgtccggtgcttttcggtgcaggttggctgaaatacgggtcgctgagcatattttgcagcagtgggagaataactttacccgcccgtgcccactcggcatctttatcgtaaggtttaccggcctgacgccagatccaggcatccatcagcatgttaccaggaccggtatcgtagcccccaaccggctgcccaggaatgagcagactcagattggcgatgccgccaatattgagcaccattcgtcgctcggttgggtgagccagcagcgcatgatggaacgcaggtaccagcggtgcgccttgtcctcccaaggcaatatcgcgacggcgaaaatcaccgacaaccgtaattccggtgcgtgccacaatttgattgttatcgccaatctgtaaagtgtgtggtgccacgcccgtcggttcatgccagacggtttgaccgtgacaaccgatcgcaactatatctcttgcctgcagattttgttccttaagcaaggcattgaccgcatcagcaaaaagttgcccgagttgagtatcaagctgtccaaactggctaagtgtaagctgctggccctggcaaatatccagtacagcctgtttcagagataccgggatcggccaactcaaacttgccagctgtgcgacccggtgttcatcaattgtcgccaacacaacatcaacaccatcaaggctggtgccactcataacgccaataaagcggccgcttttcatagttcatcctttttcaatctgacgtttgcgcaccactcaaacataaacttttcgtgaataccatgcggaatgaccgatttttaccgttggtagtaaaacattatcttcaaatcaataatcatcatgaatgttttgtttataattggttgatcctactttcattatgatttgctcatatttggtagaacatgtaaccatggattcacatatgccatatactttgaccatgagggatgcttgcgtggcgtttcatggtgaacaggagatttttcaatgattaaacgcgtattggttgttagtatggtaggtctgtctcttgtcggttgtgttaataacgacaccctgagtggggatgtttataccgcttctgaagcgaaacaagtacagaatgtcagctatggcaccatcgttaacgtacgtccggtacagattcagggcggtgatgattccaacgttatcggtgcaattggcggtgctgttcttggtggtttcctggggaatactgttggtggcggaaccgggcgttctctggctactgcagcaggcgctgttgcaggtggcgtagctggtcagggcgtacagagtgcaatgaacaaaacgcagggtgtcgagctggaaattcgtaaagacgatggtaataccatcatggtggtacagaaacaaggcaacactcgtttctctccgggccaacgtgtcgtactggccagcaatggcagtcaggtgaccgtttctccgcgctaaataagtttgcgtgtggtcaggttactgaccacacgcccccttcatttcaccctttggcctgtaactcaatgatattatgctcaagttttgcgatgagcgtaatcagttgctccagttcctctgcggagatgccatgtaatatttccgcgcgggttttgttaataacagcttccatttcgctgatcagcggctctgccttttccgtcagtttaatacgtttagcccgacgatcgctggcacaagtttgacggctaattaaccctttttcttccagttggtccagagtacggaccagacttggctgctcgatgccaatcgcttttgccagttgaatttggctctggtctggaggtaactgatggatattgtgtaacgtaacccaatgggtttgtgttaactccagcggtttcaggcgatggtctatcagagcacgccatatgcgcaccaaccgtgccagatcagaacctagtgggctttccaatttcatctccttataattagcttgctaagatattatgcggcttttagaatagtgtgcagcaattgtattgctaaaacaaatgtattgctgcatttggttaccgtcagacatatttttcagaaattgcgcgtaaatttttcgcacttaaagaatatttattaatctaacgcaatatattcggtcgtaaaggaatctactttgtgaagtttatgctcaatgcaacaggattgcccttacaagatctggtgttcggtgcgtccgtctactttcctccgtttttcaaagcattcgcgtttggattcgtcatctggcttgtcgtacaccgcctgcttcgtggctggatctacgccggtgacatctggcatcccttgttaatggatttaagcctgtttgcgatttgcgtttgccttgctctggcaatactgattgcgtggtaactatgagtattaaaacaattaagtatttcagtacaatcattgtagcggtagttgcggttcttgccggatggtggctgtggaattattacatgcaatctccgtggacacgcgacgggaaaatacgcgcagaacaggtttctatcaccccacaggtgagcggacgtattgttgagctgaatataaaagacaaccagctggttaacgcgggggatcttctgctcacgatcgataaaacgccctttcagatcgccgagctgaacgcacaggctcagctggcgaaagcgcaatctgacctcgcaaaagccaataacgaagcgaatcgtcgtcgtcatctcagtcaaaattttatttctgccgaagaactcgataccgctaacctcaatgttaaagcgatgcaggccagtgttgatgccgcacaggcgacgctgaaacaggcacaatggcaactggcgcaaacggaaattcgcgccccggtgagtggatgggtgactaaccttactacccgcatcggcgattacgctgataccgggaaaccgctgtttgcccttgtcgacagccacagcttttacgtcattggttattttgaagaaaccaagttgcgccatatccgcgaaggtgcaccagcacaaattaccctctatagtgataacaaaacgttacagggtcacgtttccagtatcggtcgggcgatttatgatcagagcgttgaaagtgacagtagccttattccggatgttaaacctaacgtcccctgggttcgactcgcccaacgcgttcccgtccgctttgcgctggataaagtcccaggcgatgtcacgttggtgagcggcaccacctgtagcattgccgtaggtcaataatgaacgcaagcagttggtccttgcgcaatttgccctggttcagggccacgctggcgcaatggcgttatgcgttacgcaataccattgccatgtgtctggcgctgacggttgcctattatttaaatctggatgaaccctattgggcgatgaccagcgctgcagtggttagctttcccaccgttggcggtgttatcagcaaaagcctcggacgcatcgctggcagtttgctcggagccattgcggcactgcttcttgccgggcatacgctcaatgagccgtggttttttctattgagcatgagcgcgtggcttggcttttgtacctgggcctgtgcgcacttcacgaataacgtcgcgtatgcatttcaactggcgggctacacggctgccatcatcgcctttccgatggttaatattactgaggccagccagctgtgggatatcgctcaggcgcgcgtttgcgaggtaatagtcggtattttgtgcggcggcatgatgatgatgatcctgccgagcagttccgatgctactgcccttttaaccgcattgaaaaacatgcacgcccgattactggaacatgccagtttactctggcagcctgaaacaaccgatgccattcgtgcagcacatgaaggggtgattgggcagatactgaccatgaatttgctgcgtatccaggctttctggagccactatcgttttcgccagcaaaacgcgcgccttaatgcgctgctccaccagcaattacgtatgaccagtgtcatctccagcctgcgacgtatgttgctcaactggcccagtccgccaggtgccacacgagaaattctcgaacagttgctgacggcgctcgccagtagccaaacagatgtttacaccgtcgcacgtattatcgccccgctacgcccgaccaacgtcgccgactatcggcacgtcgccttctggcagcgactacgttatttttgccgcctttatctgcaaagtagtcaggaattacatcgtctgcaaagcggtgtagatgatcataccagactcccacggacatccggcctggctcgtcataccgataacgccgaagctatgtggagcgggctgcgtacattttgtacgttgatgatgattggcgcatggagtattgctagccaatgggatgccggtgccaatgcattaacgctggcagcaattagctgcgtactctactccgccgtcgcagcaccgtttaagagcttgagtcttctgatgcgcacgctggtgttacttagcctattcagctttgtggtcaaatttggtctgatggtccagattagcgatctgtggcaatttttactgtttctctttccactgctggcgacaatgcagcttcttaaattgcagatgccaaaatttgccgcattgtgggggcaactgattgtttttatgggttcttttatcgctgtcactaatcccccggtgtatgattttgctgattttcttaacgataatctggcaaaaatcgttggcgtcgcgttggcgtggttagcgttcgccattctgcgtccaggaagcgatgctcgtaaaagccgccgccatattcgcgcgctgcgccgggattttgtcgatcagctaagccgccatccaacactgagtgaaagcgaatttgaaagcctcacttatcatcacgtcagtcagttgagtaacagccaggatgcgctggctcgccgttggttattacgctggggtgtagtgctgctgaactgttctcatgttgtctggcaattgcgcgactgggaaagccgttccgatccgttaagccgagtacgggataactgtattagtctgttgcggggagtgatgagtgagcgtggcgttcagcaaaaaagtctggcggccacacttgaagaattacagcggatttgcgacagccttgcccgtcatcatcaacctgccgcccgtgagctggcggcaattgtctggcggctgtactgcagccttagccaacttgagcaagcaccaccgcaaggtacgctggcctcttaattacttaattacaccacaggcatagcgttcaccgccaccgcccagcggtttaggttgatcggacatattatcgccgccaacgtggaccatcagcgctttgtctttgatttcatccagacttttcagacgaggcgcgatgacggcatcggtagctttgccgtcattattgacgaccagtgcaggcagatcgcctaaatgcccggcaccttctggcccttcatgtttaccggtattttgtggatcaagatgcccgcctgcggattccgcggcgctggctttgccatctttggtggctggctggcagcttcctttggcatgaatatggaagccatgttcaccggggggtaatgctttcagatcggggctaaactccagacctttatcggtttcagtaatggtgacgctaccaatactctgccctaccccttggctcgtgacgaggttcatctcgactttttcactggcagcttgtgcgccggttgcaacaaccagcgccagaatagccagactaaaacgtttcataggacctccgttcattgtgcattcctgaataagtgtaaaccagtgacacatttttgaacggcggctattcctaaaagtgcttacggtacgtcgtaccccagtgccgctttacggatacgaaaccattgttgacgggtcattttcagtgtttctgcttcgacagctgcccgtacgcgctcaattttaccactaccgataattggcagcggctggcttggtaaacgtaatacccaggcgtaaaccacctgttcaatgctgcccgcgtttaactcctctgccaccacagccagttcatcacgcagcggctggaaataatcatcattaaacagacgaccaccaccaaggcaggaccacgccatcggacgaacacgcagttgttgtagttggtcgagcgtgccatccagcagtaacggctgatgcaccggggatatttccacctgattagtggcaagggtaaacggcagacgactttgcaacagggcaaattgcgcaggcgtaaagttgcttacgccaaaatgacgcactttgccgctctgatgcagatgtttgaacgcgtccgccacttcatcggcatccattaacgggtctggtcggtggattaacagcaaatccagatgatcggtcgcgagattaattaggctctgttcggcgctcttaatgatgtgatcgcggtcagtgatgtaatgaccaatgacgttttcttcacgcgcggtcgtcgcgataccgcatttactgacgatttccatccgttcacgcaggtgaggtgccagtttcagtgcctcgccaaacgccgcttcgcactgatagccaccataaatatcagcatggtccacggtggtcacgccgagatccagatgctcttcaataaaactgaccagctggcgggcggacatattccagtccatcaatcgccagtagcccatcacaaaacgggaaaactccgggccttgcggcgcaatagtaatacgctgaaccataatcgcttcctcttatcagatatgagaggagtatacgcaagattaggttcaaaagagacttggttgctccggttcgtcactactcgctggcttatttgcgcgtaatttgcgcattaatcgctgccgacaaaggcgcagcacctcttgtttttcgccatcgctcattttattccagttaaaacgctcatcacgactacgaaaacagccgcgacaaaacccgcgttcgtcagactggcaaattccccggcacgggctctggacgggaaagaactctaattgctccgccacttcgccctcctcagataagattattaccattattgaagctgttaatgtccaaagtagcaactttgcttgcactagaccgactggtctactacactccaacgcatgaacaaacacaccgaacatgatactcgcgaacatctcctggcgacgggcgagcaactttgcctgcaacgtggattcaccgggatggggctaagcgaattactaaaaaccgctgaagtgccgaaagggtccttctatcactactttcgctctaaagaagcgtttggcgttgccatgcttgagcgtcattacgccgcatatcaccagcgactgactgagttgctgcaatccggcgaaggtaactaccgcgaccgcatactggcttattaccagcaaacactgaaccagttttgccaacatggaaccatcagtggttgcctgacagtaaaactctctgccgaagtgtgcgatctgagtgaagatatgcgcagcgcgatggataaaggtgctcgcggcgtgatcgccctgctctctcaggcgctggaaaatggccgtgagaaccattgtttaaccttttgtggcgaaccgctgcaacaggcacaagtgctttacgcactgtggcttggcgcgaatctgcaggccaaaattagccgcagtttcgagccactggaaaacgcgctggcccatgtaaaaaacattattgcgacgcctgccgtttaacaggcattttttatcaccagacgaccgggagcctttatgagttctgaaaaactgtattccccactgaaagtgggcgcgatcacggcggcaaaccgtatttttatggcaccgctgacgcgtctgcgcagtattgaaccgggtgacattcctaccccgttgatggcggaatactatcgccaacgtgccagtgccggtttgattattagtgaagccacgcaaatttctgcccaggcaaaaggatatgcaggtgcgcctggcatccatagtccggagcaaattgccgcatggaaaaaaatcaccgctggcgttcatgctgaaaatggtcatatggccgtgcagctgtggcacaccggacgcatttctcacgccagcctgcaacctggcggtcaggcaccggtagcgcctagtgcacttagcgcgggaacacgtacttctctgcgcgatgaaaatggtcaggcgatccgtgttgaaacatccatgccgcgtgcgcttgaactggaagagattccaggtatcgtcaatgatttccgtcaggccattgctaacgcgcgtgaagccggttttgatctggtagagctccactctgctcacggttatttgctgcatcagttcctttctccttctagtaaccatcgtaccgatcagtacggcggcagcgtggaaaatcgcgcacgtttggtactggaagtggtcgatgccgggattgaagaatggggtgccgatcgcattggcattcgcgttagtccaatcggtactttccagaacacagataacggcccgaatgaagaagccgatgcactgtatctgattgaacaactgggtaaacgcggcattgcttatctgcatatgagtgaaccagattgggcggggggtgaaccgtatactgatgcgttccgcgaaaaagtacgcgcccgtttccacggtccgattatcggcgcaggtgcatacacagtagaaaaagctgaaacgctgatcggcaaagggttaattgatgcggtggcatttggtcgtgactggattgcgaacccggatctggtcgcccgcttgcagcgcaaagctgagcttaacccacagcgtgccgaaagtttctacggtggcggcgcggaaggctataccgattacccgacgttgtaatccaacattgcgagcggcgtaaagccgccgctatactaaaacaacattttgaatctgttagccattttgaggataaaaagatgcgtcttcttcataccatgctgcgcgttggcgatttgcaacgctccatcgatttttataccaaagtgctgggcatgaaactgctgcgtaccagcgaaaacccggaatacaaatacagtctggcgtttgttggctacggcccggaaaccgaagaagcggtgattgaactgacctacaactggggcgtggataaatacgaactcggcactgcttatggtcacatcgcgcttagcgtagataacgccgctgaagcgtgcgaaaaaatccgtcaaaacgggggtaacgtgacccgtgaagcgggtccggtaaaaggcggtactacggttatcgcgtttgtggaagatccggacggttacaaaattgagttaatcgaagagaaagacgccggtcgcggtctgggcaactaatctcctgccgggcgtgaactcatcgcgcccgcatctttactgcatcgacaagtaatatttgtcataatgcgcgctgcaatttatccgtattaagagaatcagatgtccgataacgctcaacttaccggtctgtgcgaccgttttcgtggtttttatcctgttgtgatcgatgttgaaacagccggatttaacgccaaaaccgatgcgctgcttgagattgccgccatcaccctgaaaatggatgaacaaggctggctgatgccggacaccacattacatttccacgtcgaaccatttgtcggcgcaaatttgcaaccagaagccctcgccttcaacggcattgacccgaacgatcccgatcgcggcgcggtcagcgaatacgaggcgctgcacgaaatttttaaagttgtacgtaaaggtattaaagcgagcggctgtaaccgcgccattatggtggcgcacaatgccaattttgatcacagctttatgatggccgccgcagaacgcgccagtctgaaacgtaacccgttccaccctttcgccacttttgacactgctgcactggccgggctggcactcggacaaaccgtattgagtaaggcttgccagaccgctggcatggacttcgacagcacccaggcgcactccgcgctgtacgacaccgaacgcactgctgtgctgttttgtgaaatcgtcaaccgctggaaacgtctgggaggctggccgctatctgccgccgaagaggtgtaatcgagtcgatgcctgatgacatgcaatgattcaggcatctatagtgaggctattccacgcatcctgcatgatattcacggggaatagcgttaatggcagataatccagaccctagtagcctcctgccggacgtgtttagtccggcgacccgcgactggtttcttcgcgcctttaaacagccgaccgctgtccagccgcaaacctggcatgtggcggcgcgaagcgaacatgcgctggtgattgcaccgaccggctccgggaaaacgctggcagcatttctctacgccctcgatcggctcttccgcgaaggcggcgaagatacccgcgaggcgcataagcgtaaaaccagtcgcatcctctatattagtccgataaaagccctgggcaccgacgttcagcgcaacttgcagatcccgttgaagggtattgccgatgaacggcggcggcgcggcgaaacggaagtcaatcttcgcgtagggatccgtactggcgatacgcctgcacaggaacgcagcaaactcacccgtaatccgccggatattctgatcaccacacccgaaagtctctatctgatgctgacctcccgcgcgcgcgaaacgctacgcggcgtcgaaacggtaattattgatgaagtccacgcggtagcgggcagtaaacgtggtgcgcatctggcgttaagtctggagcggctcgatgcgctgctccacaccagtgcacagcgaattggcctttctgccactgtgcgcagtgccagcgatgtggcagcatttcttggtggcgatcgcccggttacggtagtcaacccgcccgcaatgcgccatccgcagatacgaattgtcgtaccggtcgccaatatggatgatgtcagtagcgtcgccagcggcaccggcgaagacagccatgccggccgggaaggctccatctggccatatattgaaacgggtatccttgatgaagtgttgcgccatcgcagcaccattgtctttactaatagccgggggctggcggaaaaactgacggcacgattaaatgagctttacgccgcacgcttacagcgttccccgtctatcgccgttgatgcggcccatttcgagagcacctccggcgcaacctctaaccgtgtacaaagtagcgacgtttttattgcccgcagtcaccacggctccgtctctaaagaacaacgagcaatcaccgaacaggcgctgaaaagcggtgaattacgctgcgtggtcgcaacctccagtcttgaactggggattgatatgggcgcggtggatctggtgattcaggtggcaacgccgctttctgttgccagtgggttacaacgcattggtcgcgccggacatcaggttggcggtgtatctaaagggctgtttttcccccgtacccggcgtgatttagtcgattccgcagtcattgtagagtgtatgttcgcaggcaggctggaaaacctgacaccaccgcataatcctctcgacgtccttgcgcagcaaaccgttgccgccgcggcgatggatgcattacaggtagacgaatggtactcccgcgtacgccgtgccgcaccgtggaaagatctgccaagacgtgtttttgacgccacgctggatatgctttccgggcgctatccctctggcgatttttctgcttttcgccccaaactggtctggaacagggagaccgggatattgaccgcccgacctggcgctcaattgttggcggttaccagcggcggcaccattccggatcgtggcatgtatagcgtgttattacccgaaggtgaagaaaaggccggtagccggcgggtgggtgaactggatgaggagatggtatatgagagccgggtgaacgacattatcactctcggcgctaccagttggcggatccagcaaatcacccgcgatcaggtgattgtgactcctgctccgggtcgttctgcccggctccccttctggcgtggtgaaggtaacggacgtccggctgaattaggcgagatgatcggcgattttcttcatttgctggcggatggcgcgttcttttccgggactattcccccgtggctggcagaagaaaatacgatcgccaatattcaggggttgattgaggagcagcgcaacgcgacgggcatcgttccggggagtcgccatctggtcctcgaacggtgccgtgatgaaattggtgactggcgtattattttgcactctccctatggaagacgggtgcatgaaccctgggcggtggcgattgccgggcgaatacatgcgctatggggcgctgacgcgagcgtggtcgccagtgatgacggcattgttgcacgtattcctgacaccgatggtaaattgcccgatgccgcgatttttttgtttgaaccagaaaagttgctgcaaattgtccgcgaggcggtaggcagcagcgcacttttcgccgcccgttttcgcgaatgcgccgcgcgggcattattaatgccggggcgcactccgggccatcgcaccccgctttggcaacaacggctgcgcgccagtcagttgctggaaatcgctcagggatatccggattttccggtcattctcgaaaccctacgcgaatgtctgcaagatgtttatgatcttcccgcactggaacgtttgatgcgtcgcctgaacggtggcgaaattcaaatatccgatgtaacgaccactacgcccagccctttcgccacaagtttattgttcggctatgtcgcggaatttatgtaccagagcgacgccccgctggcagagcgccgggcatccgtactgagcctggacagcgagttactgcgcaatctactcggacaggtcgatccgggggaattactcgacccgcaggtcattcgccaggtggaagaagagttgcaacgactggctcctggcagaagagcgaaaggtgaagaaggattgttcgacctgctgcgcgaactggggccaatgaccgttgaagacctggcgcaacggcatacaggcagcagtgaagaggttgcgagctatctggaaaatcttcttgcagtaaaacgaatcttcccagcgatgattagcggacaggagcgtcttgcctgtatggatgatgccgccaggctgcgtgatgccctcggcgtacgactaccagagagtttgccagagatttatttacatagagtcagttacccgcttcgcgacctctttctgcgctatctccgggctcatgctctggtcacggctgaacaactggctcatgagtttagtctcggtattgccattgtcgaagagcagcttcagcaactgcgtgaacagggtctggtgatgaatctgcaacaagacatctgggtgagcgatgaagtatttcgtcgtctgcgtttgcgcagcctgcaagccgccagagaagcgacgcgtcccgttgcagccacgacctatgcgcgattgctgctggaacgtcagggcgtattacccgccaccgatggtagcccggcgctctttgccagtacaagcccaggcgtttatgagggcgtagatggcgtgatgcgggtgatcgaacagcttgccggagtcggtttacccgccagtctctgggaaagccagatcctgcctgcccgcgtacgcgactatagcagtgaaatgctcgatgaattactggcaaccggtgcggttatctggagcgggcaaaaaaaactgggtgaagatgacggcctggtggcactgcatctacaggaatatgctgcagaaagcttcactcccgccgaagcggatcaggcgaatcgtagcgcgctgcaacaagcgatagtcgctgttctggctgacggaggagcctggtttgcacaacaaatcagccaacggatacgcgacaaaatcggcgaaagcgttgatctctctgccctgcaagaggcgttatgggcgctggtctggcaaggcgtcatcaccagcgacatttgggcaccgttacgcgccctcacccgcagcagttccaacgcacgcaccagtactcgccgcagtcaccgggctcgtcgtggacgtcctgtctatgcgcaacccgtcagcccgcgggtatcttacaacacaccaaatctggctggacgctggagcttattgcaggtggagccactaaacgataccgaaaggatgctggcgctggcggaaaatatgctcgaccgctacggcatcatcagtcgtcaggcggtgatagccgaaaatatccctggcgggtttccaagcatgcaaacgctttgtcgaagtatggaagactccgggcgaattatgcgaggtcgttttgtagaaggtctgggtggcgcgcaattcgctgaacgtctgactattgaccgattgcgcgatctggcgacacaagccacgcaaacgcgccactatacaccagtggcgctctctgccaacgatccggctaatgtgtggggaaatcttctgccctggcctgcacatccggcaacgctggttccaacgcgtcgggcgggtgcgctggtggtcgtttctggcggcaaattgttactctatctggcgcaaggtggcaaaaaaatgctggtctggcaggaaaaagaggaattactcgccccagaggttttccacgcgctgactaccgcactgcgtcgcgaaccacggctgcgctttacgctaacagaagtgaatgatctaccggtccggcaaacgccgatgtttacgctgctgcgtgaggcgggatttagtagtagcccacaagggctggattggggataaagaaaggactgacggatgcccgttcgcatccgtcagtattgcaggacggattattccgcgtccggctcttcagacttgtatttagcggcagtttctttgatcagctgctgcagttcgccacgctgatacatttcgatcacgatatcacaaccgccgaccagctcgccgtcaacccacagttgcgggaaggtcggccagttagcatatttcggcagttccgcacgaatgtccggattctgcagaatatcaacataggcaaaacgttcgccacatgcggcaagcgcctggactgcctgggcagagaaaccgcagctcggcagtttcggactacctttcatgtacagcaggatcgggttttcagcaatctggcgttggattttttcgatagtggtgctcattgtcttgcttcctcaaacttctttacggcagtaatctgacattgtagcgggtcagtgcggcatcggaaaataacattttcatcacgcttttgctattttatccctttgctctatttgttgcatttcaaatattcgtttcttctctgatgccggcaaactggcgtatttataaccatttttagctttcactgctgcatttttttgcgctcgccaacgaaacgtattttttaacaataaaagctattaactttctcttcttctatgcattagaatcatcaagttttgtaaatcagacgcaggcatgatagacctgcctttacagagggacgctcagtggcgcggataaaccgtattagcatcacgctctgtgctttactttttaccaccctgcctttaacgcctatggcccatgctagtaagcaagccagggagagttctgctaccactcatatcaccaaaaaagcagataaaaagaaaagcacggcaaccaccaaaaagacccagaaaacagcgaaaaaagccgccagtaaaagtacgaccaaaagcaaaaccgcttcttccgttaaaaaatcttccattaccgcttctaaaaacgccaaaactcgcagcaaacacgccgtcaataaaacggccagtgccagctttaccgaaaagtgtaccaaacgtaagggctataaaagccattgtgtgaaagtcaaaaatgccgcgagtggaactcttgccgacgcgcacaaagcgaaggtgcaaaaagctacgaaagtggcaatgaataaactgatgcagcaaattggtaagccatatcgttggggtggcagcagtccgcgtaccggttttgattgcagcggcctggtttattacgcttataaagatttggtgaaaattcgtattccgcgtacggcgaatgaaatgtatcacctgcgtgatgcagcgccaatcgaacgtagtgaactgaaaaacggcgacctggtctttttccgtactcagggacgcggcacagccgatcatgtcggcgtgtatgtcggcaacggcaaatttattcagagtccgcgcacaggtcaggaaattcaaatcacttctctcagtgaagactactggcagcgccactatgttggcgctcgtcgggtaatgaccccaaaaacacttcgctaaaactttaccctgttgttacggcaacagggtaagttcatcttttgtctcaccttttaatttgctaccctatccatacgcacaataaggctattgtacgtatgcaaattaataataaaggagagtagcaatgagtttcgaattacctgcactaccatatgctaaagatgctctggcaccgcacatttctgcggaaaccatcgagtatcactacggcaagcaccatcagacttatgtcactaacctgaacaacctgattaaaggtaccgcgtttgaaggtaaaagtctggaagagattattcgcagctctgaaggtggcgtattcaacaacgcagctcaggtctggaaccatactttctactggaactgcctggcaccgaacgccggtggcgaaccgactggaaaagtcgctgaagctatcgccgcatcttttggcagctttgccgatttcaaagcgcagtttactgatgcagcgatcaaaaactttggttctggctggacctggctggtgaaaaacagcgatggcaaactggctatcgttagtacctctaacgcgggtactccgctgaccaccgatgcgactccgctgctgaccgttgatgtctgggaacacgcttattacatcgactatcgcaatgcacgtcctggctatctggagcacttctgggcgctggtgaactgggaattcgtagcgaaaaatctcgctgcataataactgatggcaaatgcagcattgcctgaagcgctacgcttatcaggcctacgcggatcatcgatgtaggtcggataaggcactcgccgcatccggcaagataaatcgcacgttgtcagcaactgtaacgcagaaggttatccttctgcgtttttgtttaattagctgttagcaacgcaaactgtttcaggttgttttctggcactcataaacaccagcaataatgccagtcccgcgacaatcgctcccatcaccggcacaaagctgtatcccagcccagcggaaattaccgcaccaccagcagctgctcccagcgcatttccaagattaaaggcaccaatattgacactactagacagacctggcgcttcactggcgacacgcatcacgcgcatctgtaacggcggtacgaccgcaaaggttgctgcgccccacaccaccatgctaatagctgcgccgaactcattgcgggccaggaacgggattgccagcataatcaccatcaacaacaacaaaaagcctttcaacgtgccgttaacactacgatctgccagtttgccgccgagatagttaccgatagagaatccgacaccaatcagcaccagcattgccgtgacgaacaccggtgttgcgtgggtaatactttgcagtaccggagagatataggtgtagagagtaaacattgcaccagctcccagtaccgtcgtcagcaatgcagacagcacctgcggacgcattaataccgccagctcttttttcacttcaggtcgtgcccctgcaccacctttaggtaaactgaagaacagacttaccatactaatcactcccagccccgccgttgccagaaaactcatccgccagccgatggtttcacccaaccaggtcgccgccggcacgccaccgatatttgccagggttaaccccataaacatagtggcaactgcgctggcctgtttatgttttggcaccacgcttgcggccacgacactacccaaaccaaaaaatgctccgtgattcaggctggtcaaaatgcgactaagcatcagggtcatataatccggcgcgatggcggaaagtacgttgccgagcgtgaaaattgccatcaggaaaatcaacgcactgcggcgggcacgatgagaaagtagaagcgtcatcagcggcgcgccaaccattacgccaactgcataggcactgattaacattccggcagcgggaatgctgacatccacaccgcgcgcaatgacgggcaacaagcccattgggctgaactccgttgtcccgataccaaacgcgccaatcgccagcgccagcaacggatagttaattttcatgccttatctccacctcttcgcgtcattacgcgatattcattaaagtggcgaaagcatgacagcaatcacaaaaaaatgaaaataacaaaaagagaaaacacttttgccattttgctaacaaacaggaaggagatgcgagggagaacgcgctccctcgagaggaaatcagtgcagcgcggcagtcaaacccacggctacgatcaaaccgaggacgataatcgttgttaccagtgaaaatttaaggtcggtgctcatcaagttttctccttttttattaccacacaaaaagtgatattacgcatttttacacactgtgatgaaaaaatctcccgtcatttataatgataagtgtttttaccacttccccttttcgtcaagatcggccaaaattccacgcttacactatttgcgtactggccattgaccccttcctgacgctccgtgtcgtttttccggcgtaccgcaacacttttgttgtgcgtaaggtgtgtaaaggcaaacgtttaccttgcgattttgcaggagctgaagttagggtctggagtgaaatggaatggcaacaataaaagatgtagcgaaacgagcaaacgtttccactacaactgtgagtcacgtgatcaacaaaacacgtttcgtcgctgaagaaacgcgcaacgccgtgtgggcagcgattaaagaattacactactcccctagcgcggtggcgcgtagcctgaaggttaaccacaccaagtctatcggtttgctggcgaccagcagcgaagcggcctattttgccgagatcattgaagcagttgaaaaaaattgcttccagaaaggttacaccctgattctgggcaatgcgtggaacaatcttgagaaacagcgggcttatctgagcatgatggcgcaaaaacgcgtcgatggtctgctggtgatgtgttctgagtacccagagccgttgctggcgatgctggaagagtatcgccatatcccaatggtggtcatggactggggtgaagcaaaagctgacttcaccgatgcggtcattgataacgcgttcgaaggcggctacatggccgggcgttatctgattgaacgcggtcaccgcgaaatcggcgtcatccccggcccgctggaacgtaacaccggcgcaggccgccttgccggttttatgaaggcgatggaagaagcgatgatcaaggtgccggaaagctggattgtgcagggtgactttgaacctgaatccggttatcgcgccatgcagcaaatcctgagccagccgcatcgccctactgccgtcttctgtggtggcgatatcatggcaatgggcgcactttgtgctgctgatgaaatgggcctgcgcgtcccgcaggatgttagcctgatcggttatgataacgtgcgcaacgcgcgctattttacgccggcgctgaccacgatccatcagccaaaagatagcctgggtgaaacagcgttcaacatgctgttggatcgtatcgtcaacaaacgtgaagaaccgcagtctattgaagtgcatccgcgcttgattgaacgccgctccgtggctgacggcccgttccgcgactatcgtcgttaatcacccgttgcgggagtctcttccggctcccgcagccactccttattcagcgtctcactatcgccgagatactcaagcaaccaggttaacgcagggctcatatcattttgctgccatgtcagacaacatgcgctatccggaaaggggttttccagttctaatgctacccacttcccctcattaagccacggtttggcgaaatgtgttggcaccatccctatgcataatcctgcgctgatacaggttgcgctactttcccagtcaggcacgacaactcttttttggttatccagcaaccaggtaatacgtttaggtagcgttcggctggtgtcttcgcgcaccaagctcggccagttgcgcaacgtatcatcgctgaacgggccatccatcaacgccagcgggtggtgactggcaacaacgcaactccagcttagcatccccatatcccggaaggcataacgaccgcctaccggaatcgcgcgtgttgcgccaatcgccagttccacgcgcccgtcggaaagcgcatcccagacaccgttgaacacttcctgaaagacaagaagttcgacatcatcaaaatggcgataaaaatcaacgatcatctgccgtgtacgttctggcctgacaatattatccactgcgatagctaactgaccgcgccagccgttcgctatctgctgacattgctggcgggtgatctgcatttttttgacaacagagcgcccttctttgagaaaccacgctccagcagcggtcagctccacatcacggtgccgtcgttcaaagagcggcaccgccagccactcttccagctgacgcacggtatagctgaccgcagaaggaacgcgatgcagctcctgtgccgcagcgctaaaactaccattacgcgctaccgcatcaacaacttcgagactatattcactccacatagtctgcctgcaaaatttttgaaaccagtcatcaaatattaccgtttcacaacactaatttcactccctacactttgcggcggtgtttaattgagagatttagagaatatacatgcaacctgggaaaagatttttagtctggctggcgggtttgagcgtactcggttttctggcaaccgatatgtatctgcctgctttcgccgccatacaggccgacctgcaaacgcctgcgtctgctgtcagtgccagccttagtctgttccttgccggttttgccgcagcccagcttctgtgggggccgctctccgaccgttatggtcgtaaaccggtattattaatcggcctgacaatttttgcgttaggtagtctggggatgctgtgggtagaaaacgccgctacgctgctggtattgcgttttgtacaggctgtgggtgtctgcgccgcggcggttatctggcaagcattagtgacagattattatcctagtcagaaagttaaccgtatttttgcggccatcatgccgctggtgggtctatctccggcactggctcctctgttaggaagctggctgctggtccatttttcctggcaggcgattttcgccaccctgtttgccattaccgtggtgctgattctgcctattttctggctcaaacccacgacgaaggcccgtaacaatagtcaggatggtctgacctttaccgacctgctacgttctaaaacctatcgcggcaacgtgctgatatacgcagcctgtagtgccagtttttttgcatggctgaccggtagtccgttcatccttagtgaaatgggctacagcccggcagttattggtttaagttatgtcccgcaaactatcgcgtttctgattggtggttatggctgtcgcgccgcgctgcagaaatggcaaggcaagcagttattaccgtggttgctggtgctgtttgctgtcagcgtcattgcgacctgggctgcgggcttcattagccatgtgagcctggtcgaaatcctgatcccattctgtgtgatggcgattgccaatggcgcgatctaccctattgttgtcgcccaggcgctgcgtcccttcccacacgcaactggtcgcgccgcagcgttgcagaacactcttcaactgggtctgtgcttcctcgcaagtctggtagtttcctggctgatcagtatcagcacgccattgctcaccaccaccagcgtgatgttaagtacagtagtgctggtcgcgctgggttacatgatgcaacgttgtgaagaagttggctgccagaatcatggcaatgccgaagtcgctcatagcgaaagtcactgatctatatcgatatacttatacttaggctgctaacaaaattttgttgtatgattgaaattagcggcctatactaatttcgagttgttaaagctacgataaatattatgtttttacggggacaggatcgttcccgactcactatggatagtcatttcggcaagggttcctcctttccctctgttctacgtcggattatagactcgcggttttttctgcgagatttctcacaaagcccaaaaagcgtctacgctgttttaaggttctgatcaccgaccagtgatggagaaactatgagtagtagctgtatagaagaagtcagtgtaccggatgacaactggtaccgtatcgccaacgaattacttagccgtgccggtatagccattaacggttctgccccggcggatattcgtgtgaaaaaccccgatttttttaaacgcgttctgcaagaaggctctttggggttaggcgaaagttatatggatggctggtgggaatgtgaccgactggatatgttttttagcaaagtcttacgcgcaggtctcgagaaccaactcccccatcatttcaaagacacgctgcgtattgccggcgctcgtctcttcaatctgcagagtaaaaaacgtgcctggatagtcggcaaagagcattacgatttgggtaatgacttgttcagccgcatgcttgatcccttcatgcaatattcctgcgcttactggaaagatgccgataatctggaatctgcccagcaggcgaagctcaaaatgatttgtgaaaaattgcagttaaaaccagggatgcgcgtactggatattggctgcggctggggcggactggcacactacatggcatctaattatgacgtaagcgtggtgggcgtcaccatttctgccgaacagcaaaaaatggctcaggaacgctgtgaaggcctggatgtcaccattttgctgcaagattatcgtgacctgaacgaccagtttgatcgtattgtttctgtggggatgttcgagcacgtcggaccgaaaaattacgatacctattttgcggtggtggatcgtaatttgaaaccggaaggcatattcctgctccatactatcggtagcaaaaaaaccgatctgaatgttgatccctggattaataaatatatttttccgaacggttgcctgccctctgtacgccagattgctcagtccagcgaaccccactttgtgatggaagactggcataacttcggtgctgattacgatactacgttgatggcgtggtatgaacgattcctcgccgcatggccagaaattgcggataactatagtgaacgctttaaacgaatgtttacctattatctgaatgcctgtgcaggtgctttccgcgcccgtgatattcagctctggcaggtcgtgttcagtcgcggtgttgaaaacggccttcgagtggctcgctaaaggctattctatcgccccctctccgggggcgatttcagatcaggcttctgtgcctggttgattcatggcattttctcgtgccgccagcacacgttctaccgtatctaccactgcctgagtttgtggatcgatttcaatgttgacgcgtgcgccaagttttttcttcccaagagtcgtgcgttccagtgtttcccgaattaaatggacgcaaaaacgcgttggcgtgacttcgccgacggtcaggctaataccgtcgatgccaataaatcctttgtacagaatatatttcatcaactgactatcctggactttaaaccagatctggcgattattttcactggttaatattttcgccacttcagcagtggtcataatatgaccactcattaagtgtccgccaatttcatcactgaatttcgccgcacgctcaacgtttacccaatcccccacttttaaatcgccaagattggtaatgcgtaacgtttctttcatcaggtcaaaactgacatggttgccgttaatttccgtcacggtcaggcagcaaccgttatgcgccacggaagcaccggtttccaggccgtccagcatgtggtcgggtaactccaccacatgcgtacgaaaatttggtttctcgtcaatgctcaccagttttgcggtgccctgtacaatccccgtaaacatacttacaactcctgaaatcagttaagacattctgttcagcacaatagcaggtggaaaacgcccttaccagtgaaggggtaagaatggctattttttcactggagaattaataaatcctcgctacaatagactgaatttcccctgcttcttctttttgctgcccattcaggcggctttttagtctctcatataactacaaataaaaggtgttcacgtgcagaagtatatcagtgaagcgcgtctgttattagcattagcaatcccggtgattctcgcgcaaatcgcccaaactgcgatgggttttgtcgataccgtgatggcgggcggctatagtgccaccgacatggcggcggtcgctatcggtacttctatctggcttccggcgatcctctttggtcacggactgctgctggcattaacgccggttatcgcgcaattaaatggttccggtcgacgtgagcgcattgcgcatcaggtgcgacaaggtttctggctggcaggttttgtttccgttctcattatgctggtgctgtggaatgcaggttacattatccgctccatggaaaacatcgatccggctctggcggacaaagccgtgggttatctgcgtgcgttgttgtggggcgcgccgggatatctgttcttccaggttgcccgtaaccagtgtgaaggtctggcaaaaaccaagccgggtatggtaatgggctttatcggcctgctggtgaacatcccggtgaactatatctttatttatggtcatttcggtatgcctgagctcggtggcgttggttgtggcgtggctactgcggcggtgtattgggtcatgttccttgccatggtttcttacattaaacgcgcccgctccatgcgtgatattcgtaacgaaaaaggcaccgcaaaacccgatcctgcggttatgaaacgactgattcaactcggtttgccgattgcgctggcactgttctttgaagtgacactgtttgccgtcgtggctctgttagtgtctccgctcggtattgttgatgtcgcaggacaccagattgccctgaactttagtagtctaatgttcgtgcttccaatgagcctggcggcagcggtaactatccgcgtaggttatcgtctgggtcagggcagtacgctggatgcgcaaaccgctgcgcggaccgggcttatggtgggtgtctgtatggcaaccctgacggccattttcacggttagtctgcgggagcaaatcgccctgttgtacaacgacaatcccgaggttgtaacgctggctgcgcatttgatgttgctggcggcggtatatcagatttctgacagtatccaggtgattggcagtgggattttgcgtggttataaagatacgcgttccattttctatattacctttacggcttactgggtgctgggcttgccaagcggctatattctggcactgaccgatctggtcgttgaacctatggggccagcaggcttctggataggctttattattggcctgacgagcgcagccattatgatgatgttgcgtatgcggttcctgcaacgtctgccgagtgccatcattctgcaacgagcatcccgctaataaagacaaggcgcaaccttcacgggttgcgcctgtatttttacgcaggctggagcgttgcgccaatcccgtcttcgtctggctgtaatttcagagcgttacacagagtttgccgactggcatctgttatctcaacgtgtatatccccggtaacttcccctttcacattgatgaagtcaggactaatttcttttgcactggtttgcaggcaaatcgctccctctccgcgcaggcgtttcactttcagttgcacatgcgttgccgcatcagtgatcagccacagttttccaccattcagattgatgttaccaacaatgaaagtgacactgtcaccttttaccgtactgccgtctagaatcaacacaccgccctgctgtacagtaatcgtactttgttgcagctctgcgccataaccaataatcatactagcgccgtccagtaatgcaacactcccggtcagttcaaccggtgcgcgatcttcctctacgacaaaattttcgtccgcgctggtgggactcaacaggatcactgtcccaccttgtattaccgcgttttccagcgtaccggcatgcacttcagcccgaccacccacattcacggacaggttttgcgtcttaccggaactgtagagctgaaggccatccgtccccagacgataaatggatccattctcaacaatagtgtcagagtcttcaccaccgagattattcatggtgccaccagcaagcaacgtatcactggctttcccggccagcataaaaacgccgccctgattaatctcacaattgctggcttccccacctggatacaccaacaattcaccaccttcatctaccacgaccgcactggttgtcccattaaccaacaggccgccctcttgatcgagaatgattttttccgcgcgatgtccttccagtacacgcaggttaccgccattttccagcaacaaaccgcaggcataacctttatcaacgctgaattcaccttcgggatggcggccattaaccgtagcgagcgtagagagactaattgcgcctccctcggactgaacaatatctgtggcaatggcaccatcgctgacgcttagcgtgccattgttaccgtactgtgtgcatttggcgatcccaccggttgccactttcaaccagccagcccccgtgaccacggtattttcggctcttccgccagcttcaacaatcaactcgccttcagtaagttgcgtcgcgccaatgacctcgccggtcttaacaatttgcacgttcccgtcgctcatcaagtttttcgcatcagatcccatgatttattcctttgctgcatctgtgtgcctttattgctacctaagtgtaaaggctacggaggatttatccacgacagatttgagatggtggcaaacaactctgtttaaactctgatacacgaattattgggttgtatcagatgtaaatgcgatcctgaataaaaatcacccttgcaaatcaacaaaatatagccaatttgcttaaaagctctgcaaacggtcgaaatagcgcagaaaattacgttttgcctcttgccaccttcccactctgccgctaatattcgtccccgttgtcacctacaacgttgcgttcatagctcagttggttagagcaccaccttgacatggtgggggtcgttggttcgagtccaattgaacgcaccatcctgcgtccgtagctcagttggttagagcaccaccttgacatggtgggggtcggtggttcgagtccactcggacgcaccagattttcttaatctggtcttctcctttttccctctgtttcttctctgtatccaatacgttaaaagatttacactgtcttcgtatgcgttatcagaaggagaatcgctatggcaactttgttacaacttcattttgcttttaatggcccatttggcgacgcaatggctgagcagcttaaaccacttgctgagagcattaatcaggaacctggttttctgtggaaggtatggacagaaagtgaaaagaaccacgaagccggtgggatctaccttttcactgatgaaaaaagcgcccttgcctatctggaaaaacatactgcccgactgaaaaatctcggcgttgaggaagttgtcgccaaagttttcgatgtcaatgagccacttagtcaaatcaatcaggcaaaactcgcctgacagaatttaatcaagggcggttagcgcccttttcatccctgtctgaaatttctcaaattctaaaaatctcaaccaaacttatctgataacactaaattcgaaagaatgcgtacaggtaagtaacaatgaaaaaaattgctattgtgggtgccgggcctacggggatctacaccttattcagccttctacagcaacaaactccactttctatttctatcttcgagcaggctgacgaggccggtgtcgggatgccatacagtgatgaggaaaacagtaaaatgatgctggcaaatattgccagtattgaaataccgccgatttattgtacgtatctcgaatggctacaaaagcaagaagacagccatctccagcgttatggcgttaaaaaagaaaccttgcacgatcgtcagtttttaccgcgaattctgctgggcgaatatttccgcgatcaatttttacgactagtagaccaggcacgacagcaaaaatttgcagtggctgtttatgaaagttgccaggttaccgatctgcaaattacaaatgctggcgtcatgctcgctacaaatcaggatttacccagcgagacgtttgatttagcggtgatcgccacgggtcacgtctggcctgatgaagaagaagcaacccgaacgtattttcccagcccgtggagtggcctgatggaagcaaaggtcgatgcgtgtaacgtgggtattatgggaacatccttgagcggactggatgcggcaatggcagtggctattcagcatggtagcttcattgaagatgataaacaacacgtcgtttttcaccgcgataacgcaagtgaaaagctaaatatcacgttgttgagccgcacgggtattttacccgaagccgatttctattgccctattccctacgagcccttacacatcgtcaccgatcaggcattaaatgctgagattcaaaaaggcgaagagggccttttggatcgggtatttagattgatagtagaggaaatcaagtttgctgatccagactggagtcaacgcatagccttagagagcctgaatgtcgattcctttgctcaagcctggtttgccgagcgcaaacaacgcgacccatttgactgggcagaaaaaaatctccaggaagtcgaacgcaataaacgagaaaaacatactgttccctggcgttatgtcattctgcgcctgcatgaagccgtacaggaaattgttccacatctgaatgaacacgaccataaacggttcagtaaaggccttgcccgggttttcatcgataattatgcggcaatccctagtgagtctattcgtcgcctacttgccttacgtgaagcgggaatcattcatattctcgccctcggtgaagactacaaaatggaaattaatgagagccgcaccgtcctgaaaacggaagacaacagctacagctttgacgtttttattgatgcccgcggacaacgtccgcttaaagtgaaagatatccctttccctgggctacgcgagcaattacagaaaacaggggatgaaatccctgatgttggcgaagattatacgttacagcaacccgaagatattcgtgggcgcgtagcgttcggcgcgttgccctggttgatgcacgaccagcctttcgttcagggacttacggcatgtgcagaaattggtgaggcgatggctcgggcggtcgtaaagcctgcatcccgtgctcgtcggcgtcttagctttgattaaaggtaaagctatcagcactcaacaaactgatgctgttcattaagacgatagcggactccggctcgaatattgttttcaccttcaatggcgacggcgaagcgaactctttcgccgtcatgatatgccagtgcggcgcttcctcctggcccgagaataatactgtcgaccacgcccgtgctcactaccgtactattttcaccgctggcaatgatgtgtacattgtcgccgctgttggcaattctggcgtttgcgccaaagctggcgatttgcaccaggtcaccattactggcgacatgacaccgttcacccaatgtacaaacgcgtactcgcattccggtattcgcaatccgactgctatctccagcgctgcttatccggctagaattaccggttacagcaacccgtgcgcgttcaccggagctgccaatgtgactgttaaagccgacacttccaatccgcacgctataacccatactggcaatttgcgcggcatacccagcggttgcgattctggcgttatcctcacaacagccgatgcgagcatgatcgtcgctgcgggcaaactgactgcaaaatggtctctctccggggtctgtggccagtttttgcatagaggaaacttcctgatgcgcgaagttttcatccgccagccattttttccacgcatactcaaccagactctccgcccagtccgtatatccttcctcaatcagtgcatgatgaatatcggcataactaccgccgcgtgggaaatggcgcaggaaccagcgatacatcaccgctccgatacgccattctcgcaggtctgcttgtgtaatgatcattcgttagtgccggtgatagccatcgaccatgcttttaaaggtttcgtgtggcgtacgccccgtggtgcaaagataaagatgaccgaagataaaaaagaggcttataaatgccagagcaaaatgtgtctgcaataaccagtatcttacgccaggaaacacatctcccacggcttgcggatagagacacagcagccccgtcaatagtaacaacggcagcaatccatacatgacaccaacataggcgacctgctgtaagggattaaatttagactgggttgttgccgggaaaggatgttcttccccctgcataatgccaaacaaataaaatcgcgtttgttttgccgctcgttccagccacccctgacgacgaatgcgatagtggtgaccattatccccaacggcattgatcagcacaaagccgagccagcatgccagtaacaaaaatccgcaaacttcatgcaccgcaaccagacttttaaccgcagttgcgcccaccatcgcaaagtgatttatcagcccactggccagcaacaatacaaagagtaacgcattgctccagtgccataatctgaccgctttgctgtaaagataaatcttctcaccatgatcggtggcacttttcttcacgccacgagcacgaagcaaggcatgcagccccagcaccaaccacatcccaaccagcaatactccggcaatgatcaaccacaccggccaaaattcgggagtgaactgtggcacatagttcgctaactggctctgaaactgttcagcatgttggctcgggttcatacattttcctttttaatcaaatgttgaccgaaccggcgatacagatgcggtttcccggcaccaggtagctgatattgatagtatttattttgctgcaaccacgcctgaatttctgggctatcttcgcgaccaaagatcaatgcgtgttccgggcaggcgctgacgcaaatgggcggaaagccttttgccagtcgggactcagcgcagaaatcacatttatctgccactttagtgacagggttaaggtagcgaacctggtacggacaagcgccaatgcaataactgcagccgatgcactggcttttttctacccgcacgatcccctgctcatcacgccagctcgcccccgtcgggcaaacgtcgatgcacggagcatcttcgcagtgctgacaactctggcgaaaaaagtgatactgcgtttcgttgtcgttatcggtgactggaatgtgtgctatgcttaaacggcttccctgagcggggacgtggttagttttacggcatgcgcgggcgcaaatattacagccattgcaccgactctcgtcatgaatcatggcataccgaacttccttttcttgcctcgtgttcgctaacagagaagacgcagaaccagtaaaaaagattactgttcccatccccagaacaaatttgcgtcgagtgaaggacatctgattatcccctaatgcagtggctgcaactgtccaccctatccatgacatctccctgaaatttcaggggttctgaaactgctctacctcgaaccattcgcataagccataagccttgccataggtcataaatcgctcgctaaacaagtacaacaccgccgtgctactctccacctgccgtatatcggcatattcaggtgcaacatccatcgcggcgatcgcggcttcaatctgcgcttcctggaagtaatatggcgcttgcatcagcatggcgactttgtaaggacgaggatacgtctggcactcaaaacgaacggcgtgtgcaatggcgcgacaaatgtcctgctccacaacttgcaaagacatcgccgcgtagttttcactcatggcctgcgtactgtaatagtaatcatccttgcttcccgtcaaacaagcgatatccgcgtagtctccgttctgcttaatgctttccagcaaaacactcagttcctcttctgcaaccaaatagggtgggctgagaaacacggcgcgcgccaccagctgcccagccgcagaatgctggcgaatgaactcagccaggatttcagcaggttctggttcggttaccgtatcaacggggtgacgcatcccctgcaaccattgccgcttcgcctcgtcaacttcgctgactttcgctaacggcaattcatcctgatggttcatcttacccattccttacgcaggcagtagattgtgtgctgccagatcggcggcaatatcttccagccccagacgctgcaatgtttcgcgggttggacaaccaagctgtgggtcccagcccatttctttgtagaacatcgtgaggctagcatgcatatcgtcacgatccattttgtcagtaccttcagtaaagaccgggatctgcggatccttgtcgaatacccaggaacagataagatcgtgttcattacgcatatctttggtttgcatcagttttaccgtgtaggcacgatgcaacgtaaaaatacgctctgcagctaaatctaatttttcctgagtcatctcttcgccggtgatcgctttgaagaatttggcttcaagcgccagatcgccccggtaattacggcttttcagcgggctaacggtcattggccagacccagttgcacagggtgacggcgttatgcaaacagacccgcaacaggctccactttgcatatttaatttttgcgtcattgattggcgtgtagtttttggtttcatcgtaagcatcttcagaaccaaaaagttctttcgccacttcacgttgcagtttcaatggcaagccggaaccaataaagttgatatgggtatgcgtcatgcagtcacggttgaacatacagttaacaatggaaccgacctgcgcactcgcttcattggcatggtgaaccggatagccaaacgggctccagagtttatttttcgcgtagccccagtactcttcacccaaattccagcgttctgcgatggcataactaccatcagccaggtgactcagctcacccacacgatgcgccagacggtagtaaaaatctttaatgaagttaacgtcacccgcttccagttgatcccagcgaatttctgcatactcttcagctggcagaacacgcttgaacacacctttgctgtaacaataagtaaagtcgcgatgcaactgcccgtagttacaccataggccgtagtcatcgaacaaattcagacccaccaggttaccaatcacacgaccatcgtctttatcttcaaaatctttcggcccgttcgggaagatggtggtatggacaaagtttgctacacaagtgttaccacctgtgctgggcacgccaaactctttcacccgaggaatattcatttgggtcatacaacggatcgggcaagagtggcagccgctcatttttactgtgtatttctctgccgccggtcctaagtcaaaaacggatttataggtacgaaagccgaccgtattctgattgcctggcggaatttcacccgtttcaatcggaccaccttcagccgcgccccaaaacagccctttacgtgctgtccagcgactcttgggatcactatactctgcccagctttgtggcgtacttggcacgacatggttgttattcgcaccaataagttcagtcatcatgtaatcattgagacgcttcatctcctgacgatcggcaatgttgacccctttcgtcccttcaaccgcaatcgctttcaggtttttgctacccattattgcgccagttcccgcaccgccgctgtggttacggctattcaacatgccagagagaggaacaaggttttccccagcctgaccaatagccgccacacaggtttccggactggtcaatcgacaaatttcttccgtcgttgcgcgcgtcccttttccccataagaaatcggctttttccaggctaactttgtcatctttaatcttcagccataccggacttttcgccttcccttcgataataatgacgtcgtatccagcgaatttcatttgcgctgcaaaaaagccacccatatgggcatcgacgactaaatttcctttggtaaaagtagaaagactggtgatatttacgcgagaactacagggggcaccagatccagttaatgggccggtagcaaagactaatttattcgcttcatcgaaaggtttcgtgcctggcggtacttcgtcatacataattttgtagccgaagcccatgccaccgacaaaacttttaaacttactggaatcttcgagggtaatatttcctgtcgtgagattgactcttaatatattacctgtccaaccgttagccatgattttttcctttgcaagattcacacagtaatatctttccactcgataatttttaacgcccctgttgggcaggcgtttgcgcattcaccgcataacacacatttgctggattttttactttcggtatttacggtggccatcatccacgggcatgccgtagtacaggcgctacagccaatacagcgtttatgatcgacggtaatacagccttctttctgctgccaggtaatcgcaccaatcgggcagacgttcatgcattgcggctctttgcattgacggcaggtgtccgcggtatagttgagatcgccatacaggccgccgccagagccaaccccgttgtcgccaaagaaataattgcgatggattttgatacgggagaagaatgtccctacactgccatcgttgaagttggtacaagagatttcacagcggtggcaacccgtgcatcgcgctcgctgggtcaccagcacccctttgggggtatttatcaaccctactgtgccgctatcaatatcttcctgtttgcaacccaaaagactcagtaacgcaggggcaattgttagaccagcaaggccttttccacttatacgcaagaattctaatcgcgttaagccaatatctaatagtggacgatcaaccgggttcatttatttcgcatcctcttcgcaaacacagtgctgacaattcagcagcctgatattaagcattcaactaatacgctgctgactctgtccccaacaccagatattttccctaacccgatagtgtatgagaaaagattaacgccgataaactaatcctttatggttaggagaaaaaataatgtgattattctgagcccttaacattgatcgttatcaattaaaattacaaagcaagaaattataagtgaactgatatttattatcatttgaaataaatttaacttaagcgacaattatttgtgactttcattgcagaaaataaaaataacattatcgctataaattaaaatacataccgaaattcgtataatttcagcagttgttatttagaatgattaactggaccgcaactgaagcaagaatatcaggatgaagcttaccgcctcatcctgaatggtcattttaccagtgcgttaatgacggtttccatcgcctgcttttccagctcactgcgctgaatgcgtttattggctaatgctgtacgtaatacgcctgcgataacaatatgctttggttcctgccccagatcgcgcatttccagcacaactttaccgacaactctgcacatttctcggtacagttcatcctcttttgtccgatttcccattctttatacctatttatcatgccaactatcagcatatatcaatctaaccaattaaacaaaaatcaaacaaaatcagacaaataacgcgataaattattttaactgtagcaattgagcgatgatatatttatacaccggatgaactttcacttatcctcacactgacaacttcggcaccagacgttgcgcaaacagtgaagtttttgcgtaaccttttccctggaacgttaaatctttgataacaatttattgtctaacaagttgtatattttttgaaacgctgtttttgttttccttttggattaatttcagcgtataatgcgcgccaattgactcttgaatggtttcagcactttggactgtagaactcaacgactcaaaaacaggcactcacgttgggctgagacacaagcacacattcctctgcacgctttttcgatgtcacctatccttagagcgaggcaccaccactttcgtaataccggattcgctttccggcagtgcgcccagaaagcaagtttctcccatccttctcaacttaaagactaagactgtcatgaaaaagaccaaaattgtttgcaccatcggaccgaaaaccgaatctgaagagatgttagctaaaatgctggacgctggcatgaacgttatgcgtctgaacttctctcatggtgactatgcagaacacggtcagcgcattcagaatctgcgcaacgtgatgagcaaaactggtaaaaccgccgctatcctgcttgataccaaaggtccggaaatccgcaccatgaaactggaaggcggtaacgacgtttctctgaaagctggtcagacctttactttcaccactgataaatctgttatcggcaacagcgaaatggttgcggtaacgtatgaaggtttcactactgacctgtctgttggcaacaccgtactggttgacgatggtctgatcggtatggaagttaccgccattgaaggtaacaaagttatctgtaaagtgctgaacaacggtgacctgggcgaaaacaaaggtgtgaacctgcctggcgtttccattgctctgccagcactggctgaaaaagacaaacaggacctgatctttggttgcgaacaaggcgtagactttgttgctgcttcctttattcgtaagcgttctgacgttatcgaaatccgtgagcacctgaaagcgcacggcggcgaaaacatccacatcatctccaaaatcgaaaaccaggaaggcctcaacaacttcgacgaaatcctcgaagcctctgacggcatcatggttgcgcgtggcgacctgggtgtagaaatcccggtagaagaagttatcttcgcccagaagatgatgatcgaaaaatgtatccgtgcacgtaaagtcgttatcactgcgacccagatgctggattccatgatcaaaaacccacgcccgactcgcgcagaagccggtgacgttgcaaacgccatcctcgacggtactgacgcagtgatgctgtctggtgaatccgcaaaaggtaaatacccgctggaagcggtttctatcatggcgaccatctgcgaacgtaccgaccgcgtgatgaacagccgtctcgagttcaacaatgacaaccgtaaactgcgcattaccgaagcggtatgccgtggtgccgttgaaactgctgaaaaactggatgctccgctgatcgtggttgctactcagggcggtaaatctgctcgcgcagtacgtaaatacttcccggatgccaccatcctggcactgaccaccaacgaaaaaacggctcatcagttggtactgagcaaaggcgttgtgccgcagcttgttaaagagatcacttctactgatgatttctaccgtctgggtaaagaactggctctgcagagcggtctggcacacaaaggtgacgttgtagttatggtttctggtgcactggtaccgagcggcactactaacaccgcatctgttcacgtcctgtaatattgcttttgtgaattaatttgtatatcgaagcgccctgatgggcgctttttttatttaatcgataaccagaagcaataaaaaatcaaatcggatttcactatataatctcactttatctaagatgaatccgatggaagcatcctgttttctctcaatttttttatctaaaacccagcgttcgatgcttctttgagcgaacgatcaaaaataagtgccttcccatcaaaaaaatattctcaacataaaaaactttgtgtaatacttgtaacgctacatggagattaactcaatctagagggtattaataatgaaagctactaaactggtactgggcgcggtaatcctgggttctactctgctggcaggttgctccagcaacgctaaaatcgatcagctgtcttctgacgttcagactctgaacgctaaagttgaccagctgagcaacgacgtgaacgcaatgcgttccgacgttcaggctgctaaagatgacgcagctcgtgctaaccagcgtctggacaacatggctactaaataccgcaagtaatagtacctgtgaagtgaaaaatggcgcacattgtgcgccattttttttgtctgccgtttaccgttactgcgtcacgcgtaacatattcccttgctctggttcaccattctgcgcactctctacactaggcgcattgctggctgcgggagttgctccactgctcacgctaaccggataccctgcccgacgatacaacgctttatcgactaacttctgatctacagccttattgtctttaaattgcgtaaagcctgctggcagtgtgtatggcattgtctgaacgttctgctgttcttctgcgcttagtggtcgatgtacttcaacataacgcatcccgttaggctccacggaatatttcaccggttcgttgatcactttcaccggcgttcccgtccgcacgctggagaacaaggctttaatatccggtgcattcatgcgaatacacccactactgacgcgcaaaccgacgctgtccggcgcactggtaccatgaatgaggtattcgccattaccatgcgcgaggcgcagtgcgtaacgtcctagcgggttatttggtccggcaggaacgactggcggtaatttaatgccacgctccaggctacgctgacgaatgcctgccgtaggcgtccaggttgggttagggattttctgcccaacacgcgtttccatcaccggcgtttccagcccctgcaatccaatacctattggataaacctgcacaatattttctcccggcggataataataaaggcgcagctctgcaaggttaacgataatcccctgacgcggtgcatcaggtaataacagttgactaggaatagttatcgtcgtaccaggttttggcaccggggcgatagtgttattggcttcaaggatcaacattgccgcagtatcaaaacgtcgggcaatagcctgaaggtttttatccccttcttgcaccgtatacgtttgattttgcccaaccagtcggcttccggttggtggtagcggataatcaaccgcccaggcagcctggatggcgctaaaagcgccgataagcgtgagtgtaagcaaagacgcgcgtttcattgtaaacctcctgtatttgccggagactcacgctgaaacgtcggatggcgcttatgttcacctgaaaccaaaacactcctgtgcaggtcagtgtaaacattgaccatccggcaatgtgagccaaccggatgaaagctgtccttttagtttagctaagtgcagcggctttggcgcgaattgcgcgaatcatcgcttccagaccttgactacgagatggggtgagatgttgggtgagcgccattttttcaaaccacggacgcacatcgaaattgacaatatcctgcggcgtcatctgatcgtagagaataaagacgaccgcaataagccctttcacaatcgccgcatcgctgtcgccctgtaattcaataattccctgggcattctggcgcatgacaatccacacctgactctgacagccctgaatgctattttgtggacttctgtcttcgtcgcgtaattctggcagacgctggcccagctcaataatgtagagatatttctcttcccagttggcgcagcgtaaaaaattacgcagcaacttttctttatccggcaataaagccatagtgcctccctgttatcccagcaaacggtgaatacgttgcaggccggtcaccagacgatccacttcttcatgggtgttatacatggccaggctcgcccgacacatcgcagggacgttgtaataggccatcaatggcattgcgcagtgatgtccggtacgcacagcaatgccgtaattatcgagaaaactgccaacatcataggcgtggtgtttaccgagattaaaagcaataacgccaagcctgttttgtgggccatagagagtgagatccggtacagattccagctgacttagcgcataatgcatcagattctgttcatactcggctatgttattaagccccagcgcgctaacatactccagcgccgcgccaagaccaatgatgcccccggtattgggtgtaccggcttcaaaccgccatggtgctttggtccaggtagtgccttcactcaggctgacggtggcgatcatagaaccgcccccttcccacggcggcatctcctgcaacaaggcttctttcacataaagaatgccaattccggtggggccatacagtttatgcccggagaacacgtaaaagtcgcaatccagcgcctgaacatccaccggatgatgcatcaccgcctgagcgccatccaccagcacttttgcgccatgctggtgcgcaagcgtgatcatttccgccagtggattttctgtgccaagcacgttggagacatgagtaattgccagcaggcgagttttctcatcaaacagcgtaggcagcgtctccagttgcaacgtaccatcgggattgagcgggatcacacgcagctctgcgccaacgcgtgcgcaaagcatctgccagggaacaatgttagcgtggtgctccatctgactgatgatgatgttatcgcccgcccgcacgttgctgttgccccagctattggcgaccagattgatcccttccgtcgtgccgcggacgaacaccagctcttccgcgctacgggcattaataaacaggcttgcccgcttgcgcacgttctccattttctcggtcgcctgggcgcttaaggtatgaataccacgatgcaccgccgcgtagccatgacgataaaactcggcctcggcgtcaatcacctggctcggtttctgcgcactggcggcgctgtcgagataagccagcggcaaaccgtttacctcacggctaagcaccggaaagtcggcccgcactttgtcgacggaaaaaatcatcttgcacctcctggcagccgttgaccgattcgggccagcacctgctgtttaagcccctcatcacgcagtgcttccgtcagttcggcagcgaaggcgtaaatgatcatctgctgggcatcctgctgattgatcccgcggctgcgcagatagaatatctgttcatcatcaatacgccccaccgtcgcgccgtggctgcatttcacatcatctgcatagatttccagctgcggtttcgtatccacttccgccagtttgcccatcagcagattgttgttggtcatctgaccatccgttttgatggcgtgctgcgcgacgttgatcaaaccgttaaataccgcgcggcctttgtcgctgacgatagttttgtgcaactgtcggctgttacaaaaacctttattgtgttccagccaggtacgggtatcacacacctcgtttttcaccggcatcgccaggctattgatccgcagcgtgctgttttcgccattgagttgcgtactggtgttgtgtcgtaacactgcgccacccagcaggaaactgtggctaaatgcggtggcatcctcagccagcaacaaatcgttatgagcaaagtggtgactgagcgggttttcaaacgccagcttgatatgctgcaagtgggcattcgctgcgacgttgatagtgaaccgtgccccggtaaaatgacgagcatcattcaggctgacaaaatgttcgatcaccgttgcttcggcaccttccgccagatccagatgatgtcggtaatgggcagtgttcacctcttcacctgccacgccctgggtgatatgcattaacagcaatggctttgccggccgttgaccgcgcttcacggcgatatgcgtcacgctttgtgccaggctttccgtcaaatgcagaaacacttccgcctgaatagcgtcgggtaaaccctgacggtcgtcgttaatgctcacttcatatccgctgccttcagttgcatcgctcagtgcgggcacgtaacgcccatcgacaaacaccagccgcacggagtctaacgttaacgctaaggcattacgctgctgtggggatatctctcccgcaatgctgacaaactggctattgatcagcccttccagcggcgtatatttccagttttcatgtttacgtgtcggcagtccggtacgcagcaattgttgtaaatgctgctgtgcttgcggggagcgttttgtcccttcagcttcaaacaagtgatgccactgttgcagcgcgttactgctgttcggtaagccagccataaccctgctcctccagttgtttgaccaacgtgaaatcgccggatttcacaattcgtccctgatatagcacatgaacgtaatcaggcttgatgtagtcgagaatgcgttggtagtgcgtaacaatgatgaaactgcgcttgccatcacgcaggctgttcacgccatcggcgaccacttttaatgcgtcaatatccagcccggagtcgctctcatcaagaatgcataactccggttccagcaccgccatttgcaaaatatcgttgcgctttttctcgccgccggaaaaaccaacgtttacgctacgggttaataaatcttccggcatcttcaggagagcgattttctcttccatcaaatcctgaaaatcaaagcggtcgagcgtttcctggccgcgatagctgcgcaccgcattaagtgccgtttgcaggaaaaactggttactgacacctggaatctccaccggatactggaaggccataaagatgccttcgcccgcgcgatcttccgggctcagcgcaagcaaatctttgcctttgaactcaaccgtgccgcccgtcacttcataatcttctcgcccggcaagcgttgcgcttaaggtacttttgccgctaccgtttggccccataatggcgtgaacttcgccgggatgaacgtcgaggcttaatccgcgcaggatagctttatcttccacgctgacgtgtaaatctttaatacttaacatgtttattccttatccgacgctgtgttcaagactgatggcgaggagtttttgtgcttcaacggcaaattccaacggcagctcgctgaacacgtctttgcagaaaccgttaacaatcatgctgatggcgtcttcttcgctgatcccgcgttgcaggcagtaaaacagttgatcttcaccaatacgacttgtcgttgcctcgtgttccagttgcgcactattgttacgacactcaacatacgggaaggtatgcgccccacaattagcgccaatcagcatactgtcgcactgagtgaaattgcgcgcattggttgccgtcggcatgattttcactaagccgcgataactgttctgactatgtccggcagagatccctttgctgataatggtgcttttggtgtttttaccgatgtggatcatcttggtgccggtatccgcttgctgatgaccgctggtcagcgccacactgtaaaactcaccaatggagttatcgccgcgcaaaatgcagctgggatatttccacgtaatcgcactcccggtttcactttgcgtccaactcattttgctgttttcgccttcgcacaaagcacgcttggtgacgaagttgagaataccgccggtgttgttatcgccaggaaaccagttttgtaccgtggaatatttcacctcggcgtttttatggatgatgacttccaccactgccgcgtgtaactgatagctgtcacgcaccggagcggaacagccttcaatgtagctgacgtagctgtcttcgtcggccaccagaatggtgcgctcaaactgcccggttttttctgcgttaatgcgaaaataggtggaaagttccatcgggcagcgcacgcctttaggcacataaataaacgtaccatcagaggctaccgccgcattaagcgcggcaaagaagttgtcattccccggcaccacggtgccgagatatttacgcaccagttccgggtgatcgtggatcgcctcaccaaaggaacagaaaataattccctgctccgccagtttttcgcgataagtagtggcaacgctaacactgtcgaaaatggcatccaccgccacctctttgccttcccgcacgggaacgcccaactgctcaaacgccgcctccacctctttacttaaaaaggcgttcgcgccagtttgctgcaccgcgccaggttcagacgcgcaagtgtcgtcacaattaccgcagcttggtgcactgtagtagctgtaatcctgataattcagcttgtcgtagtgcgctttcaaccagtgcggttcttccatctccagccatgcgcgataggcgtttagacgaaactccagcatccactccggctcattacgcttcgcgctaattgcgcgcaccacctcttcgtttatcccctttgccagctcatcggtggctaactgggtgaagaatccttctttataattcagcgggccgccggtccaggttttgacatcgtcagttgcttcagtattacgagacatagtaccgcttataccccaaagctttcgccacagccacattcattctgggctttagggttgtgaaatttgaatatctgattaagtccttcacgaacgaaatcgacttccgtgccatcaataaacggcatcgcttgcagcgggacaaacagcttcgcgccgtcgtgttcaaacagcagatcgtctttgtccggctcgctaacactgtcgagcacatagccaaagcccgcgcagcccgtttgcttcacgcctaagcgcacgccgaccatacccggctgctttgccaccagctcacggatgtgtatcgccgctgcgggtgtcagcgttaagccttgccaggcgaaatcttgtgggttaaaggttccactatgcatgtccatcgatttacctcacttcatcgctttcagcgtataacagcatgttagtgataatgattatcagttcaacccagcaaacgcaggggctttaccgtaaaacatgctttttgcctgcttttaataagcatagaccctgatgtgtgggttaacaggcacgctaagaattaggtatctcattgttagataatggttattatctaaggagcattaaggctgtgatgaaaaagaaaaagttgtattgaaaatgactatttaagagataggtaaaaaagtgcagcgttcagaaataagaaaacccttaagtctgtgcgacacaggcttaagggtttctaccccatccggcgcttatctccggcactctcagtggcttagctcttgaaggggcgataagaataatctcataaagctaacccgccgttttaacacaaactgcgattagtattatttttgaacaatatcaggcggtagataagcagtattaagaaggtcatcgaacctggacggaggttaatccaggtcgatttggcgaacttgcggcattaagtcaggatcaatgcacgcccagacgccaggcaaagtagatttcttcttttaattcagcagaagagagagtaagcaggtcagcaaattcaagttctagttgtttcagacgtttgagatattgggcaggactaagattgctctggtcacggcgtaaaaattcaatggccagctgggtgggatcaagttgagtagacatagcatcctcgcttttagacaagacctgcacagtataccaccgtttactgtgcagataatgaccaaaagcaatatgcgtcacacttttctggtgacaacgtcacaaaatggcggtcgtcaatcgactgctacagcacaaacgccctttctcatcgaagatttcaatctgccagacctggtgacggctaccgagatgcaacggtttgcatacgccgcgcacccgcccttctcgtgcgctgcggacgtggttagcattgatttccagaccaaccactttttgctcaccttcggtacataaataaccggcaacggaaccgatactttcggccagtaccacggatgctcctccatgcagcaacccgaaaggctgctttgtccggctgtctactggcattgtcgcttcaagggtgtcatcaccaatatgttcaaagcgaatatccaggaaccccaccatgtttccttcacccatagcattcagtgcttccagggtgattttccgtttccatatcatttaataatctccagtaaagcctgcacaggatggcgtacccccgtgccttcaacccgttttacctggctacggcaggaatatccggtcgccagacagcggttacgcggcagtcgctgcatagcctgatgccaggataactcatagatcccgaggctattttcatggtttttcgcttcatgtccgtaagtccctgccatgccgcagcaacccacgctgacattttccagtttcgcgccaaaacgggcaaatatcgcggcccattgtgctggcgcacccggcaaggcggtaacttcggtacagtgaccaaagaaataccaactttcaccgctgactgtagccactggctgactctcaagtgcgcttgccagccattcattcgccagtaagacgttaaactcgccacgctcctcgcccagcgccagtttatattcatcgcgataacaaagtaccagcgccggatcgacgcccaccattggcatacccagcttcgccatacggttgaggaaatccgccgtctttttcgccgtcttcgcaaaacgattaagaaaacctttaatatgctgggctttgccatttgggctaaatggcagtaacacaggctggaaacctaatttttcgaccagacggacaaaatccgccaccacttgcgcatcgtaatagctggtaaaggggtcctgcaccaccaacactgtgcgcgctttctgctctgcattgagagattcaagctgttccagcgtcatgtttgcgctgcgatgccccaccatttgttgttgtaggctggggacgctcagcagcggcaaatcaaccatgccgatatgtttttcgctgagtttgcgcaccagcggctggttaatgaagaagttaaaggttttcggcgcgcgtgccatcagcggcgcgtagctctcgaccgtagcgacgaggtggtcgcgcagcgggcgtaaataacgggtgtgatagagctgcagaaaacgagagcgaaactccggcacatcaattttgatggggcactgggtgctacacgctttacaggccagacagccgctcatcgcctctttgacttcgtgactgaagtcatattcgcctttattcgcatgccagctattgcgcgtgcgggcaattaacgtccgcaaactgacgccggattcaggcagttcttgttccagtttgagtggatcaacgccgcgatccgccaacaaacgcagccattcacgcaccagcgttgcgcgccctttcggactatgaatccggttctgggtgatcttcatgctcggacacatcggactacgggcatcaaagttgaagcataaaccgttgccgttacactccatcgcaccgcgccactgctggcgtaccgcaatggggatctgccgatcgaatgtaccgcgcttcaccgcgtccactttcatcatcggcgcatcgagaccttctggcgggcaaatcttccctgggttgagtcggttatgcgggtcaaatgccgctttcactttgcgcagttctgcaaaaagttcctcaccgaaaaacgccgggctgtattcagcgcgaaaacctttgccgtgctcgccccacaacaaaccaccgtatttcgcagtcagcgccaccacgtcatcagagatttgcttcatcaaaatctcttgttgaggatcgcacatatccagcgctggacggacgtgcaagacacctgcgtcgacgtgaccgaacataccgtagcttaagccgtggctgtcgagcagcgcgcgaaattcagcaatataatccgccaggtgttccggcggtacgcaggtatcctcagcaaacggaattggcttagcggcacctttggcattgccaagcagaccaacggcttttttgcgcattgcatagatacgttcaacccccgccagctcacggcacacctgccagccgatgacacctgcttgatgactggcgatcagctcatccaaccgcgcacagagtgcatttacccgctcatcaatcagcgcctcatcatcaccagcaaattccacaatgttcagcccgagcatctcttggtcaggcacatcggtaatcaactcgctgacggaatgccagacaatatcttcccgcgccagattcagcactttactgtccaccgtctctacgctaagcgcccgcgcctcaaccataaacggcgcgttacgcagcgcagagtcaaaagagtcatatttgacgttcaccagacggcgcactttaggcaagcgtgtaatatccagccgcgcttcggtaataaaggccagcgtcccttcactacccgtcagaatgcgcgtcaggtcgaactcggtcatctcatcgttaaagacatgacgcagatcgtaaccggtaagaaagcggttaagtttggggaagttgtcgataattaactggcgttgctgacggcaacgttgataaaccgtgttataaattcgcccgattgtggtattggatttacccagcgtttccgccaattcgacgggtaaaggttgcgtatcgagaatatcgccccccaacaacaccgcgcgtacgccaagtacgtgatcactcgttttgccatagaccaggcttccctgaccggatgcatcggtattgatcatcccaccgagcgttgcccggttgctggtgctaagttccggcgcaaaaaagtagccgaacggtttcaggtactgattgagttgatcttttatcaccccggcctcaacgcgcacccagccctcttcagggttaatttcgatgatgcggttcatatggcgggacatatcaacaataatcccctggttgagcgcctgaccgttagtgccggtgccgccgccgcggggggtaaagatcaggctactatagcgttcctgcgcggcaagacgggcgatcagcgccacatctgcggtactacgcggaaataccaccgcatcggggagaagttggtaaatactgttgtcggtgctcattgtcagacgatcggcataacttgtcgccgtatcgccggtaaaaccttgttgctccagctcttgcaaaaaattaagcaccagttgaacgacgccgggtgcctgggaaatctgtggaatcattatattgaccctttcctgcggtctgtgatgtaggtcgatacactattctttcaggctgctgcaatagcgcactgaaaggtgatgtttgtttactctatggatttcgtgttgcaggaaggcggcaagcgagtgaactccaggagcttacaatagtaagtgactggggtgaacgaacgtagccgcagcacatgcaacttgaaatacgacgagtaaatcgtttgcgtgttgcctgagttgttgtaccacatttttttctaacacgcccatcagaattaagggcagaatcggcctgttaaaaaccgctgaaattgctcatcattatgcaggtgagtttcgcgtgttcacgtcgcgtcgacgatttgacgcacaaaaaaggtgaaaagtagttatggtaaatgttcgtcagcccagggatgtcgcacaaattctgcttagcgtgctgtttttagccatcatgattgtggcatgtctgtggattgttcaaccctttattctcggctttgcatgggccggtacggtggttatcgccacctggccggtattgttacgtttgcaaaagatcatgtttggccgccgctctctcgccgttctggtgatgacgctgttattagtgatggtgtttatcatccctattgctttgctggttaacagtatcgtcgacggcagcggcccgctaattaaagccatttccagcggtgacatgacgttacccgatctggcgtggcttaataccattccggtgattggcgcgaagctgtatgcaggctggcacaacttgctggatatgggggggacggcgatcatggcgaaagtccgcccttatattggcaccaccaccacctggttcgttgggcaggcggcgcatatcgggcgctttatggtgcattgtgcgctgatgcttctcttcagtgccctgctgtactggcgcggtgaacaggtggcacaaggcattcgccattttgcaacccgtctggcaggcgttcgcggagatgccgccgtgctgctggcggcacaggctatccgcgcggtggcgctgggtgtggtggtgacggcgttagtacaggcagtgcttggcggtatcggcctcgccgtatccggcgtaccttatgcaacgttgctaacggtgttaatgatcctctcctgccttgtccagcttggcccgttgccggtactgattccggcgattatctggctctactggactggcgataccacctggggaacggtattgttagtgtggagcggtgtggttggcacgctggataacgtcatccgcccaatgttaattcgcatgggtgccgatttaccgctgatcctgattctctctggcgttattggtggtttgattgctttcgggatgatcggtctgtttattggtccggttctgttagccgtttcctggcgtctgtttgccgcgtgggtggaagaagtcccgccgccgacggaccaaccggaagaaattctcgaagaacttggcgaaatcgagaaaccgaataagtaatttctcatcaggcggctctgccgcctgattgttaaccaccgctaattgatatttgcttgctcttccccatattttcctgcttaccgccattcagctggtagtacctgtcgcaaattctttacagtttttaaactaatgagacgaatctgatcgacgcaaaaagtccgtatgcctactattagctcacggttataaatcaacatattgatttataagcatggaaatcccctgagtgaaacaacgaattgctgtgtgtagtctttgcccatctcccacgatgggcttttttttaacatttttccgcttcgctacctcgcccctcactctttccaataatgttgcacaagatactgtgactctcttcaagccgtcagcaggctgataatgttatttatattttattgtttatttcatgcagccattacacgatgaacgcttatgaactccaggcactccgccatatttttgccatgactattgatgaatgcgcgacctggattgcccagaccggtgacagtgaaagctggcgtcagtgggaaaatggcaagtgtgccattcctgatcgtgtagtcgagcaactgttggctatgcgtcagcaaagaaaaaaacatcttcatgccatcatagagaaaataaataaccgcatcggcaacaacaccatgcgttttttccccgacttaaccgcatttcaacgagtctaccctgatggcaattttattgactggaagatctatcaaagcgtagctgctgaattatatgcacacgatctggagcggctttgttaatttttccacagaaaggaattgtcgttgttacaacaataatgaacggatgctgacacaacatcgcttcactttttaaagcacctttgctaagtagaacctatgaaaaatccctatttccctaccgcacttgggttgtattttaattacctggtgcatggtatgggcgtccttttgatgagcctgaatatggccagcctggagacactttggcagactaatgccgcgggtgtcagcatagttatcagtagcctgggcattggtcgattaagtgtcttgctttttgcaggattattatccgatcgctttggtcgccgcccttttatcatgctcgggatgtgctgctatatggccttcttttttggcatcctgcagaccaataacatcattatcgcttatgtttttggctttctggcgggaatggcaaacagttttctcgatgcaggcacttatcccagtttgatggaagcttttccacgcagtcctgggacagccaatattttaattaaagcatttgtttccagcggacaatttttattaccgctaatcattagcctgttagtgtgggctgaactgtggttcggttggtcctttatgattgctgcaggcattatgtttattaacgctctgtttttataccgttgtacgttcccaccccatccgggtcgtcgcttacctgtcataaagaaaaccaccagctctacggaacatcgctgtagtattatcgatttagccagttataccttatatggctatatcagtatggcaacgttttatctggttagccagtggctggcacagtacggacaatttgttgcaggcatgagttacactatgagcatcaaactactcagtatctacaccgtgggtagcctgctttgtgtatttattaccgctccactcattcgtaataccgttcgcccaacaacattactgatgctgtacacctttatcagttttattgctctgtttaccgtctgcctgcatcccacattttatgtggtgataatatttgcttttgtcattggttttacctctgctggaggtgttgtgcaaattggcctgacgttaatggctgaacgtttcccttacgctaaaggtaaagctacagggatctattacagtgcgggcagtattgcgacctttactattccgttgattacggctcatctgtcccaaagaagtattgccgatattatgtggttcgataccgccatcgctgccatcggttttttactggcactgtttatcggcttacgcagccgcaaaaaaacgcggcatcacagcctaaaggaaaatgtcgctccgggtgggtaatgcaatattcttttcaggtcatgcaagatcttacggataaataactctttctgcgctaactaaggaaaatcgcgatcaaaaacaaactatgacatgcaatattcctggaaacataaactttatgccatgtacccagggaaaatcatcttcagtatagtaattatgtaaaccgtcggagaacaatacgtacggtaacgaaattatctttcagcaaggagctgtgaaaatgtctcaaaataaggctttcagcacgccatttatcctggctgttctttgtatttacttcagctacttcctgcacggcattagtgttattacgcttgcccaaaatatgagttctctggcggaaaagttttccactgacaacgcgggcattgcctacttaatttccggtatcggtttggggcgattgatcagtattttattcttcggtgtgatctccgataagtttggtcgtcgggcggtgatattaatggcagtaataatgtatctgctattcttctttggtattcccgcttgcccgaatttaactctcgcctacggtctggcagtgtgcgtaggtatcgctaacagtgcgctggatacgggtggctaccccgcgctcatggaatgctttccgaaagcctctggtagcgcggtcatactggttaaagcgatggtgagttttgggcaaatgttctacccaatgctggtgagctatatgttgctcaataatatctggtacggctatgggctgattattccgggtattctatttgtactgatcacgctgatgctgttgaaaagcaaattccccagccagttggtgggcgccagcgtaactaatgaattaccgcaaatgaacagcaaaccgttagtctggctggaaggtgttagtagcgtactgttcggtgtagccgcattcagcaccttttatgtgattgtggtgtggatgcccaaatatgcgatggcttttgctggtatgagtgaagctgaggcattaaaaaccatctcttattacagtatgggcagcttggtctgtgtctttatttttgccgcactactgaaaaaaatggtccggcccatctgggctaatgtatttaactctgcactggcaacaataacagcagccattatctacctgtacccttctccactggtgtgcaatgccggagcctttgttatcggtttcagtgcagctggcggcattttacagctcggcgttagcgtcatgagtgagttttttcccaaaagcaaagccaaagtcaccagtatttatatgatgatgggtggactggctaactttgttattccactgattaccggttatctgagcaacatcggcctgcaatatatcattgttctcgattttactttcgcgctgctggccctgattaccgcaattattgtttttatccgctattaccgcgttttcattattcctgaaaatgatgtgcggtttggcgagcgtaaattttgcacccggttaaacacaattaagcatagaggttaaaggagttaattatggatgttaccgcaaaatacgaattgattgggttgatggcctatcctatccgccacagtttaagccccgaaatgcagaataaagccttagaaaaagcgggattgccatttacctatatggccttcgaagtggataacgatagctttcctggagcaattgaaggattaaaagccctcaaaatgcgcggaactggtgtaagcatgccgaacaaacaactggcgtgtgaatatgttgatgaattaacaccagctgccaaactggtgggggccatcaacaccatcgttaatgatgatggctatctgcgtggctataacaccgacggcacgggccatattcgcgccattaaagagagcggttttgatatcaaaggcaaaacgatggtgctgttaggggccggtggtgccagtacggcaattggcgcgcagggggcaattgaaggtttaaaagaaattaaactctttaaccgtcgggatgagttcttcgataaagccctcgccttcgcgcagcgggttaatgaaaacaccgattgtgtcgtcacggtcaccgatctcgccgatcagcaagcctttgctgaagccctggcttccgccgacattttaaccaatggcacaaaagtgggtatgaaaccccttgagaatgaaagtttggttaatgatatcagtctgttacatccgggacttctggtcactgaatgcgtgtataacccgcatatgacgaagttattgcagcaggcgcaacaagctggttgcaaaacgattgatggatacggcatgttgttgtggcaaggggctgaacagttcacattatggactggcaaagatttccctctggaatatgttaaacaggtcatggggttcggtgcctgacaggctgaccgcgtgcagaaagggtaaaaaatgaaaaccgtaactgtaaaagatctcgtcattggtacgggcgcacctaaaatcatcgtcagcctgatggcgaaagatatcgccagcgtgaaatccgaagctctcgcctatcgtgaagcggactttgatattctggaatggcgtgtggaccactatgccgacctctccaatgtggagtctgtcatggcggcagcaaaaattctccgtgagaccatgccagaaaaaccgctgctgtttaccttccgcagtgccaaagaaggcggcgagcaggcgatttccaccgaggcttatattgcactcaatcgtgcagccatcgacagcggcctggttgatatgatcgatctggagttatttaccggtgatgatcaggttaaagaaaccgtcgcctacgcccacgcgcatgatgtgaaagtagtcatgtccaaccatgacttccataaaacgccggaagccgaagaaatcattgcccgtctgcgcaaaatgcaatccttcgacgccgatattcctaagattgcgctgatgccgcaaagtaccagcgatgtgctgacgttgcttgccgcgaccctggagatgcaggagcagtatgccgatcgtccaattatcacgatgagcatggcaaaaactggcgtaatttctcgtctggctggtgaagtatttggcagcgcggcaacttttggtgcggtaaaaaaagcgtctgcgccagggcaaatcagcgtaaatgatttgcgcacggtattaactattttacaccaggcataagcaataatatttcggcgggaacaccctccccgccgaactaaaaaatatattcaatcgtatttaataaaaatatttcgtgagtctctgtgcgctaattctccatttggcgtagggaaaatcacatctgaatcaggaattaacaatgaaacctgtaaaaccacctcgtattaatggacgagtgccggtcctgagcgcacaggaagcggtgaattatattcccgacgaagcaacactttgtgtgttaggcgctggcggcggtattctggaagccaccacgttaattactgctcttgctgataaatataaacagactcaaacaccacgtaatttaagcattattagtccaacagggcttggcgatcgcgccgaccgtggtattagtcctctggcgcaagaaggtctggtgaaatgggcattatgtggtcactggggacaaagcccgcgtatttctgaactcgcagaacaaaataaaattattgcttataactacccacaaggtgtacttacacaaaccttacgcgccgccgcagcccaccagcctggtattattagtgatattggcatcgggacatttgtcgatccacgccagcaaggcggcaaactgaatgaagtcactaaagaagacctgattaaactggtcgagtttgataacaaagaatatctctattacaaagcgattgcgccagatattgccttcattcgcgctaccacctgcgacagtgaaggctacgccacttttgaagatgaggtgatgtatctcgacgcattggttattgcccaggcggtgcacaataacggcggtattgtgatgatgcaggtgcagaaaatggttaagaaagccacgctgcatcctaaatctgtccgtattccgggttatctggtggatattgtggtggtcgatccggatcaaacccaactgtatggcggtgcaccggttaaccgctttatttctggtgacttcacccttgatgacagtaccaaacttagcctgcccctaaaccaacgtaaattagttgcgcggcgcgcattattcgaaatgcgtaaaggcgcggtggggaatgtcggcgtcggtattgctgacggcattggcctggtcgcccgagaagaaggttgtgctgatgactttattctgacggtagaaacaggtccgattggcggaattactagtcaggggatcgcctttggcgcgaacgtgaatacccgtgccattctggatatgacgtcccagtttgatttttatcacggtggcggtctggatgtttgttatttgagttttgctgaagtcgaccagcacggtaacgtcggcgtgcataaattcaatggtaaaatcatgggcaccggtggatttattgatatcagtgccactagcaagaaaatcattttctgcggcacattaactgcgggcagtttaaaaacagaaattaccgacggcaaattaaatatcgtccaggaaggacgggtgaagaaatttattcgggaactaccggaaattactttcagcggaaaaatcgctctcgagcgagggctggatgttcgttatatcactgagcgcgcagtattcacgctgaaagaagacggcctgcatttaatcgaaatcgcccctggcgtcgatttacaaaaagatattctcgacaaaatggatttcaccccagtgattagcccagaactcaaactgatggacgaaagattatttatcgatgcggcgatgggctttgtcctgcctgaagcggctcattaacaggagtataatgatggatttttctttaactgaagaacaagaactgctgctggccagtattcgcgaactgattacgactaactttccggaagagtatttccgcacctgcgatcaaaacgggacatatccgcgtgagtttatgcgggcgctggcggataacggtatttccatgcttggcgtgccggaagaatttggtggtatccctgcggattacgtcacccaaatgctggcgctgatggaagtgagtaaatgcggtgctccggcatttttaattaccaacggtcaatgtattcacagtatgcgccgtttcggttctgcagagcagctacgtaaaacggcagagagcaccctggaaacgggtgatcccgcctatgccctggcgttgacggaaccaggtgctggcagtgataacaacagtgccactaccacttacacgcgtaaaaacggcaaggtctacatcaacggacaaaaaacctttattaccggtgcgaaagagtacccgtatatgctggtgctggcgcgcgatccgcaaccgaaagatcccaaaaaagccttcaccctgtggtgggtcgactccagtaagcccggcattaagattaacccgctgcataaaatcggctggcatatgctcagcacctgcgaagtctatctcgacaacgtggaggttgaagagagcgacatggtgggcgaagaaggaatgggtttcctcaatgtgatgtacaactttgagatggagcgcctgatcaacgccgcgcgcagcaccggctttgccgaatgcgcctttgaagatgccgcccgctatgccaaccaacgtatcgcttttggtaagcccattggtcataaccagatgatccaggaaaaactggcgctgatggcgattaagatcgacaacatgcgcaacatggtgctgaaagtggcatggcaagccgatcagcatcagagtctgcgcaccagcgcggcgctggcaaaactgtactgtgcacgtaccgcaatggaagtcattgatgatgcgattcaaatcatgggcggtctgggctataccgatgaggcgcgcgtctcccgcttctggcgtgatgtccgttgtgaacgtatcggcggcggtacagacgaaattatgatttacgtagcaggtcggcagatcctgaaagactatcagaacaaataatctgcaggcggcgcagcttcttaacaaactgcgccgccagatttatccaacaagacttaccggttgaggaaattcagataggatttcttgttccgcaaaacagtttttaaattgtctacggtaatcgctggggctacaaccgacatggcgcaaaaacagtttggcaaagtgatcgacattttcataacccacacgccaggagatctctgcctgacttaattcagtattagtgagactccattttgcttccgtcatacgccgttgaataacatagttaataggggaaatacgatactctttggtaaattcatggcaaatataactgacgctggcacgaaattttttgcttaactgttctaaagtgattttttcgcgataattattattcagatagaaaagaatatcttttatcagaacatcttttttaatatacccctgctcgctacgataagcatttttaaaattttcgtagtaaagaatggctaacgtataggcaaatgcatcccataagctagatgtttggctatttttactttgcggcaaaatcacacttagctcattaaataaggtttttatgacttcttttccctgccccgcggcaattaccggacaagaatgcggttgcagtagctgattttcctcagccccctgaaactgaaagccgtacagcgcacaggtacacgtcgttgccggatcgttaacgtcagaggccaccgcatgcagcctgccgcgttctatcaccacaatgtcatccgcatgtgcgacatataagctagaatcgatggtaaaccttgcaacccctttcttgacgtaaatcaactcggtttcattgtcatgaacgtgatgtccggactcccattttggatcatcgctaaatgcaaaacgactaagccgtggcgttttaccggcgacaaacagcgtttcactggcgttatcaaaacagcgttgatacatgacaacctccctattccatgagcaagcaaaaacaatatatgccggataaaatacggcgtgtattgcggttatacaaccgcgtttagcgagagctaaacaagattatttacactgaatgcaagattgtacggtcatggaataactatattgccgcaaattgcacttttgttttagcgatcgcattttttttgcaagattgttggcaaggaaaacagcttgctccgtcgaaaaccccgcaccgctatcgcacactattttcaggccatttttaccttccatcggagatggttccgtatgcgactcacaggagaaatcatgaaaataataacctgctttaagctggtgcctgaagaacaggacattgttgtcactccagaatacaccctgaatttcgacaatgccgacgccaaaatcagccagttcgatctcaatgccattgaagctgcaagccagctcgcaacagatgacgatgagatagccgcgctgaccgttggcggcagtttgttgcagaacagcaaagtgcgcaaagacgtgctatcccgcgggccgcacagcctgtatttggtgcaggatgcgcaacttgaacatgcactgcctctcgataccgcaaaagcgctggcggcagcaattgaaaagatcggcttcgatttactgatctttggtgaaggttccggcgacctttatgcccagcaggttggcttgctggtcggagaaattctgcaacttccggtgattaatgcagtgagtgctattcagcgtcagggcaatacactggtgattgaacgcacgcttgaagatgatgttgaagttattgaactctctgttccagccgtgctctgcgtcacctccgatattaacgtgccacgcattcctagcatgaaagccattctcggcgcgggtaaaaaaccggtaaatcagtggcaggcaagtgatattgactggagccagagcgcgccacttgctgaactggtcggcattcgcgtaccgccgcaaacagaacgtaagcacatcattatcgataacgatagcccggaggccattgccgagctggcggaacatctgaagaaagccctgaactgaagcctacggagaagaaacgatgagtcaattaaacagcgtctgggtctttagcgataatcctgaacgttatgctgaactgtttggcggcgctcagcaatggggccaacaggtgtatgccattgtacaaaataccgaccaggcgcaggcagttatgccttatggtccaaaatgtctttatgttcttgcgcaaaacgacgcgctgcaacgcactgaaaattacgccgaaagcattgctgccctgctgaaagataaacaccccgctatgttgctgttggccgcgacgaaacgtggtaaagcgctggcagcacggttaagtgtgcaactgaatgcggcgctggtgaacgatgccacggcggtggatattgtcgatggtcacatttgcgccgaacaccggatgtatggcgggttagcgttcgctcaggaaaagatcaacagcccgctggcgatcattacccttgcacccggtgttcaggaaccgtgcaccagtgatacctctcatcagtgcccgacagaaacggtaccttatgttgctccgcgtcatgaaattctctgtcgcgaacgccgtgcgaaagccgcaagcagcgtggacctgagcaaagcaaaacgtgtggttggcgtcggtcgtggactggcggcgcaggatgacctaaaaatggtccacgaactggcggcggtgctgaatgctgaagtcggctgtagtcgtccaattgccgaaggcgagaactggatggagcgtgaacgttatatcggtgtctccggcgtgttgctgaaatccgatctctacctgacgctggggatctccgggcagatccagcatatggttggcggcaacggcgcaaaagtgattgtcgccatcaataaagataaaaatgcgccaatcttcaactatgccgactacggtctggtgggcgatatctacaaagtcgtccctgccctgattagccagttgagccgctaattcccctttcaaccacatctcccgctgtaaacgcagcgggaagggagcataacgcatgagcgatgacaaatttgatgccattgtggtcggtgcgggcgttgctggtagcgttgccgcactggtcatggcacgagccgggctggatgtcctggtgatagaacgcggcgacagtgccggatgtaaaaacatgaccggcgggcgtctttatgcccacacacttgaagcaatcattccaggctttgcagtaagtgcgccggtagaacgcaaggtcacacgcgagaaaatctccttcttaaccgaagaaagcgccgttaccctcgattttcaccgcgagcagccagatgttccgcaacacgcatcttataccgtattgcgtaatcgtctggacccgtggttgatggaacaagccgagcaggcgggcgcgcagtttatcccaggcgttcgcgtcgacgcgctggttcgtgaaggaaacaaggtcactggcgtgcaggctggggatgatattctcgaagcgaatgtggtgattctggctgatggcgttaacagcatgcttggccgcagcctgggaatggttcccgcttccgatccgcatcattacgctgttggtgttaaagaggttattggcctcacaccagaacagatcaacgatcgctttaatattacgggcgaggaaggtgccgcctggctgtttgccggttccccttctgacggcctgatgggcgggggatttctctataccaacaaggattccatatccttggggctggtttgtggattgggtgatatcgcccatgcgcaaaaaagcgtgccgcaaatgctggaagattttaaacaacaccccgccattcgcccgctgattagcggcggcaaactgcttgaatattccgcgcatatggtgccggaaggcggtctggcaatggtgccgcaactggttaacgagggcgtgatgatcgttggtgacgccgcaggcttctgcctgaatttgggttttacggtccgcggcatggatttagccatcgcaagcgctcaggctgccgccacaacggtgatcgccgccaaagaacgcgcggatttctccgccagcagtctggcgcaatacaaacgtgagctggaacaaagctgcgtcatgcgtgatatgcagcattttcgcaagatcccggcgctgatggaaaacccgcgcctgtttagccaatacccacgaatggtagccgacatcatgaacgagatgttcaccatcgacggcaaaccaaaccagccggtacgaaaaatgatcatgggacatgcgaagaaaattgggctgatcaacttgctgaaagatggcattaagggagcaaccgcgctatgagccagaacgctacggttaacgtcgacatcaaattaggcgtcaataaattccatgttgatgagggccacccgcatatcattctggcggaaaatcccgatatcaatgaattccataaattaatgaaagcctgccctgccggactttataagcaggatgacgcaggaaacattcattttgattccgccggttgtctggagtgcggcacctgtcgggtgctgtgcggtaacactattctcgaacagtggcaatatcccgcaggcaccttcggtattgattttcgctacggctaatcatgcatcccacaggcccgcatctcgggcctgatgttctgtttcgagagtccaacatgaaagtgacattaacgtttaacgaacaacgtcgtgcggcgtatcgtcagcaagggttatggggcgatgctagcctggccgattactggcagcagaccgctcgtgcgatgccagacaaaattgccgtggtcgataatcatggtgcaagctacacctatagcgcgctcgatcacgccgcgagctgtctggcaaactggatgttagcgaagggtattgaaagtggcgatcgcatcgcatttcaactgcctggctggtgtgaatttaccgttatctatcttgcctgcctgaaaatcggtgcagtttccgtgccgctgttgccttcctggcgggaagcagaactggtgtgggtgctcaataagtgtcaggcaaaaatgttctttgcaccgacgttgtttaaacaaacgcgtccggtagatttaatcctgccgctgcaaaatcagcttccacaactacaacaaattgtcggcgtggacaaactggctcccgccacctcttccctcagtttaagtcagattatcgccgacaataccagtctgaccacggcgataacgacccacggcgatgaattagctgcggtgctgtttacctccggaaccgagggtctgccaaagggcgtgatgctaacgcataacaatattctcgccagtgagcgggcttattgcgcgcgactgaatctgacctggcaggatgtctttatgatgcctgcgccacttggtcacgcaacgggctttctgcatggcgtaacggcaccattcttaattggcgctcgcagcgtgttgttagatattttcactcctgatgcgtgtctcgcgctgcttgagcagcagcgttgcacctgtatgctcggcgcaacgccgtttgtctatgatcttttgaatgtactagagaaacaacccgcggaccttagtgcgctgcgtttctttctttgcggcggaaccacaatccccaaaaaagtggcgcgtgaatgccagcagcgcggcattaaattattaagtgtttatggttccacagaaagtagcccgcatgcggtggtgaatctcgatgatcctttgagccgctttatgcacaccgatggttacgctgccgcaggtgtagagattaaagtggtcgatgacgcacgcaagaccttaccgccaggttgcgaaggtgaagaagccagccgtggcccaatgtgtttatggggtattttgatgaacctgaattaaccgcccgtgccctggatgaagaaggctggtattacagcggcgatctctgccgtatggatgaggctggctatataaaaattaccggacgcaaaaaagatattattgtccgcggcggcgaaaatattagcagccgtgaagtggaagatattttattgcagcatcctaaaattcacgatgcctgtgtggttgcaatgtccgatgaacgtttaggtgaacgaagttgcgcttatgtcgtgctgaaagcgccgcatcatagtttaagcctggaagaggtagtggctttttttagccgtaaacgggtcgcaaaatataaatatcctgaacatatcgtggtaatcgaaaaactaccgcgaactaccagtggtaaaatacaaaagtttttgttaagaaaagatattatgcggcgtttaacgcaggatgtctgtgaagagattgaataagtttcatcttcggggatcacataaccccggcgactaaacgccgccggggatttattttatttcttcagttcagccaggcttaaccaggtttgcaccacggtgtccgggttcagagacaggctatcgatcccctcttccatcaaccatgcggcaaagtcttcgtggtcggacggaccctgaccgcaaatcccgacatatttgccctgtttcttcgcggcacggatagccatgctcagcagtgctttcaccgcatcgttgcgctcatcgaacaattcagacaccacgccggagtcacggtccagaccgagcgccagctgcgtcatatcgttactgccaatactgaagccgtcgaaatattcgaggaactgctcggccagcaaggcgttggacgggatttcacacatcatgatgattttcagcccgttctcgccacgtttcagcccctgacgcgccagttcttcaaccaccgctttcgcctgatctacggtacgcacgaacgggatcatgatctcaacgttggtcagtcccatgtcgttgcgcacacgtttcactgcttcacactccagcgcgaaacagtcgcggaagctgtcggaaacatagcggcccgcgccacggaagccgagcatcgggttctcttcatctggctcgtaacgctcaccaccgaccaggttggcatattcgttgcttttaaaatcagagagacggacaatgacgcgcttcggataaaacgcggcacccagcgtcgcgatcccttcagtcagacgaccaacgtaaaattcacgcggagaatcaaaacctttcatcatctcgcggatttcgttttgcaactgcggttcctgatcgtcaaactcaagcagtgcgcgtgggtggacgccaatcatacggttgatgataaattccagacgcgcaaggcccacgccttcgttcggtaggcaggcgaagtcgaaagcacggtccgggttaccgacgttcatcatcactttcaacggcagatccggcatcgtttctacgctggagcttttcacgctaaattccagcaactccgcatagacgtaaccggtatcaccttcggcacaagaaacagtgacgttctcaccgtctttcatccgttctgttgcatctccacagcccactaccgccggaatgcccagttcacgagcgatgatcgccgcgtgacaggtacgaccgccacggttggtgacgatggcagatgctttcttcatgatcggttcccagtccgggtcggtcatgtcagtaaccagcacgtcgccaggttcgatgcggttcatttcgctgatgtcatggatgactttcaccggacccgcaccgatgcgatgaccgatagcacggccttcggcgataatcttaccctgactatgcagcgtataacgctccatgacctgaccgcgactgcgcacggtttccggacgcgcctgcacaatgaacagtttaccggtgtggccatctttcgcccactcaatatccatcgggcgaccgtagtgtttctcaatttgtacggcctgttttgccagttcctgcacttcttcgttggtcaggctgaagatgtcacgctgttcctgcggtacgtcttcgattttaacctgcttgccgtgctcctgggtcggcgcgtaaaccatgcggatttttttgctccccatggtgcggcgcacgatagccgggcgattcgccgccagtgtcggtttatgcacgtaaaactcatccgggttaaccgcaccctgcacgaccatctcaccaaggccccatgcggaagtgataaacaccacctggtcaaagccggattcggtatcaatggagaacatcacgccagaacttgcgaggtcagagcgcaccatccgttgaacaccggcggagagcgccacaccacggtgatcgtaaccctggtgcacacgataagagatggcgcgatcgttaaacagagaagcaaatacatgtttcactgccacgagaacggcgtcaaaaccctgaacgttgaggaaggtttcctgctgaccggcaaaagaagcgtccggcatatcttctgcggtggcggaggagcgcaccgcaaaagaggcgttttcgtcatcggcggaaagctgtgcataggcttcgcggatggcgttttccagctcaggctggaagggagtgtcgataatccactggcggatttgcgcgcccgctttcgcaagctgagtaacatcgtcaatatccgttttatccagcagttcataaatgcgctggtttacgccgctttggtccagaaactggttaaacgcgtcggcggttgtggcgaaaccattcggaacggaaacacccattccggaaagattagtaatcatttcacccagggaggcatttttgcccccaaccctgtctacatcattcatgccgagttggttataccaaagcaccagcggactgctgccattgttggacatcgaacaatccttttgtgataaatgaacggtttgagaaacacatttctgcgcatttatctttgcatatttaaccggatgaaaaaaacggtgaatcgttcaagcaaatatatttttttactttttaagactgatcccagcgttgcgcaaatctgctctcttcgacaatttccacataaaccatcggtataaacgaaaccataaaaatgaaatgctgttttcataaaaaataaaattgaaggttcattttataaaccagacataacgttctacgcttctgtgcgtttttaatttatgctttcatagaattatgtctgcatcacgggaagaacaaaatggataatgctgttgatcgccacgttttttatatttctgatggtacggcaataactgcggaggtattaggacacgcagtaatgagtcaatttcccgtcactatcagcagcatcacgctgccgtttgtcgaaaatgagagccgtgcacgggcagtgaaggatcagattgacgcaatttatcaccagacaggcgtgcgcccgctggtcttctactccatcgtgttgccggagattcgcgccatcatcttgcaaagtgaaggcttttgccaggatatcgttcaggcgctggttgccccgctacaacaagagatgaaactggatccaacgccgattgctcatcgtacccatggccttaaccctaataatctcaataaatatgatgcgcgcattgcggcgattgattacaccctcgcccacgatgacggcattagcttgcgcaatctggaccaggctcaggtgatcctgctcggtgtttctcgctgtggtaaaacccccaccagtctgtatctggcaatgcagtttggtatccgcgcggcaaactacccctttattgccgacgatatggataatctggtgctacccgcgagcctcaaaccgcttcagcataaattgttcggcctgactatcgacccggaacgtctggcggcgattcgcgaggaacgtcgggagaacagtcgctatgccagccttcgtcagtgcaggatggaagtcgcggaagtggaagccttgtaccgtaaaaatcagatcccgtggattaacagtaccaattatagcgtagaagagattgccaccaagatcctcgatatcatgggccttagtcgccgaatgtactaaagaactagtgcattagcttatttttttgttatcatgctaaccacccggcgaggtgtgacacacctcgcacttgaaatcagcagcgattggtttatcgtgatgcgcatcacttcccggcagtcctgccgtagaagcaacaaatttctgagacttgtaatgaacagaactgacgaactccgtactgcgcgtattgagagcctggtaacgcccgccgaactcgcgctacggtatcccgtaacgcctggcgtcgccacccatgtcaccgactcccgccgcagaattgaaaaaatactgaatggtgaagataagcgactgttggtcattattggcccctgcagcatccacgatctcaccgctgcaatggagtacgccacccgtctgcagagcctgcgcaaccagtaccagagtcggctggaaatcgtaatgcgcacctattttgaaaaaccacgaactgttgtcggctggaaaggactaatctccgatccagatttaaacggcagctatcgggtaaatcacggtctggagctggcgcgcaaattacttttacaggtaaatgagctgggcgtcccaaccgcgaccgagttcctcgatatggtgaccggtcagtttattgctgatttaatcagttggggcgcgattggcgcacgtactaccgaaagtcagatccaccgcgaaatggctagcgcactctcctgtccggtaggtttttaaaatggtaccgatggcaatacgcggattgctgtggatgctatccgcgcagcccgcgccagccatatgttcctcagcccagacaaaaatggtcagatgaccatctatcagaccagcggcaacccgtatggccacattattatgcgtggcggcaaaaaaccgaattatcatgccgatgatatcgccgcagcctgcgatacgctgcacgagtttgatttacctgaacatctggtggtggatttcagccacggtaactgccagaagcagcaccgtcgccagttagaagtttgtgaggatatttgtcagcaaatccgcaatggctctacggcgattgctggaattatggcggaaagtttcctgcgcgaaggaacgcaaaaaatcgtcggcagtcagccgctcacttacggtcaatccattaccgacccgtgtctgggctgggaggataccgaacgcctggtcgaaaaactcgcctctgcggtagatacccgcttctgaatgcgtgcccattcctgacggaatgggcatttctgcgcaacttgttgtcttctcaacaaattactgcttgctctggtcagccataatattgataataagaatcattgttatatcaattattattaatttttatgcgttatacggatagcagaaaactcacgcctgaaacggatgccaatcacaagaccgcttccccgcagcctattcggcgaatttccagccagacactgttaggtccggatggcaaactgattatcgatcatgacgggcaagaatatctgctccgtaaaactcaggctggcaagctgctgttgaccaagtaacctttaactgctgcagctgacttccagccgtttaccccagtcaggtggacgactgacatagtcatcatctctgtcgctgaaaggatttcgcaacgcctcatgcaggcggtgcaattccgtcatatcacccttttctgccgcttcaatcgcccgttgcgccaaccagttgcgcaataccagagcggggttaacgctttgcatcagttgctgacgctcactatcgctaacctcgtcttgttgcaaacgcccccgataacgggcaaaccagtcatcaaatgccgcacgatcaataaactcatcacgtagcggactcgccgcgctgtgctgctcggtcagactcagcatgcggaatgtgcgggtataatcgctgcgctctcgcgccatcagactgaataattcattcagtagcgcgttatcctctttttgctccgtcatgaagcccagtttctgccgcatccgttctccataatgcgtcaacaaaacctgctgatagctgtccagggcctcattcagggcatctacggcaacaaatgggctcaatgtctgcgccagacgctgtaaattccacaacgcgacggcaggttgattatcaaagctgtaacgcccttgatgatcgctgtgattacaaataaaaccgggttcgtaatcatcaagaaaaccaaacggcccgtaatcaagcgtcagccccagcaggctcatgttgtcggtattcatcaccccatgagcaaagccgaccgtctgccattgggcaattaagctcgcggtacgtgcgacaacatcgctaaaccagagacggtatttgtcctcatcatctgcaagatgactccagtaatgacgaatagcaaagtcagctaactgacgaaccttttcgctctcgcggcggtagtaaaaatgttcgaaatgaccaaagcgcagatgacttggtgccacacgcatcagcatcgcgcctggctccgccgtttcccgatacactgggctatcgctggtgacgatacttaacgcgcgggtcgtcggaatgcccagataatgcatcgcctcactggcgagactttctcgtatcgtgctacgtaaaaccgcccgtccatcacccattcggctataaggcgtcaggccagcacctttcagatgccagtccattgtagtgccatcagcaagcagttgttcgccgagtaaaatgccgcgcccatcacccagttggcccgcccagacgccgaactgatgaccactgtaaacctgcgccagtggactcataccaggcagtagggcttcgccgccccagacacctgcgccatttttaaacaggctgcttggaatactcagcgtgttagccagttcggtattatgccaaatcagccgggcattatttaaaggcgtaggggaaagtgctgtataggtttctggcaattcatcgcgccagcgggtaacaaaagacagggtcatagatcctcctgtttgatagtgtagacggttactctcgtcttaaacaccagcaaacagaagggttatcgctgaaccaacgtcgttatctgatttatgggaacggcaggccacaggcatccctggagagcatggaaatcgaagggggtaatctgtgccaatatttctgccgtatcaatgcctcccgcaatgatgcaattgcaacaaggggaaatttgcgcctggatcgcacgaataaacggttcgaaggagcggtgcgtgatttgttgctgaataaaacttttatccagcatgacgcgggtgaaaagaccatcaaaaaccgctttcattgtgctattgcctgctcccaaattacctaacacaaggggatacacttggcttaaggataaaagaccgcgattatcttttccttcattgagatgcgggtaattctcattaatcaacagttcaataaacggatattttaatagttcgcctgcgtaattatccctctctaataataatgtagccacttgtggcgttaaattaagccaggcaaagagtttatgttgaataaaaaaatgttggcaactttttagtaattccaactgctcactaaataattgccaatgttgctcctcggtaagttgcgctataacccgactcgtcgggatacgaaccgtaccatcttcactggagaaatgggtaattaactcaacgccgacaaggacttgctggttgtctcttatcggcaggaaatagcaatcagaatgataaagattctccaaaaaaatcttcatggtaaccgtccctctcgaaggatgtttttcagtatccggctaaaagggatgaggccataagacataacaattacagaaggagtaactttcatttgttccatgttaaccactttttcaggggtcctttttttagattatcctgattataaacgaataatccatttacggaatttttgtctgcaaaatactactgtattcaggagtaaatggacggcgatgtatcatcgccgtccatttttcgacatattagattcgtctcgcctgccagaaatttttctgccaatagacattatcaagactggaacgcatcactcccttgctggtagaggcgtggataaattggttgttggtatcgtaaatacctacatgcaaaccattttgtccggaccccgttttgaaaaagaccaggtcacctggcagcaactcgtctttatcaatttgcgtgccaatagaggcttgttgtttggtttcacggggcagctgcaaatcgaaacgatcgcgcatcgtcacaaccacaaatccgctacagtccacaccgcgccgcgtcatgccaccataacgatacggcgtgccatgccagctttgtagctggtcgttcaaaccggcaataacggtaatgctatcagaaagtctggcatttggcggcggtgctttatggtggctacacccggccagaagcagtgctgtgatcaaaataaggcagaaacgcattccgtacggttcctctgttttttattcttgcattaatttagcgtcgtaattacccgattttcaagatactaatgaaatcagatggtgctaatcagcattctgtgaccttcgatatccagacggcgaaaattcatcccataggcctgcgccagatttggcggcgtgagcacctcttccctgcgtccactggccagcatttttccaccttttagcaaccacgcccgatgcgcatgacgcaatgtgtggttgagatcgtgactgctcatcacaatcgccagtccttgctgacacagcgcgctcagaattttgtctaacgcactttgttgcgcaacatcaagactgttcatcggctcatcaagaagcagcaattggcctgcgggattggcttgtggtgtgatttgcaacaccaccgcagcaagacgtacgcgttgccattcaccgccggaaagttgattggtgctacgtccgagtttgtcatcaagagccagcgcccctgcgacatcattcagtagttcggtacgcgttttatcgtgctgatgcagtgtcaggtagtgccagaccggcgttgcaaacggcggcgtctgctgttgactaagataggcgcgatgcagcgcgagttttgttgcggaccatgcttccagtggttgccccgcgaactgaatgcttcccttaccgctggtcattccggccattcgcgccagtaaggtactcttacccgcgccattcggccccaccaggtgcaggatctccccagcccgaacctcgccagaaagcggccccaggcgggtagattccgcaacatcttgtaactgcatcacaatagacattattttgccaacgccagtttaatgctttccatcacaatgggatcttccggcgtcatatccggggaaaaacgctggatgacttttccgtccctgccaaccaggaatttttcaaaattccataaaatatcatccgggtacagcggtgcacggcctttgctgaccatacgggcatagaatccgctctcttccggcgcgactgcggtcggcgctgcggcaatcaatttttgatacagcggatggcgtccttcgccattaacttcaatcttactgaacatcgggaacgtcaccccccatgtggtggtacagtaagttttaatctcttcatcgctgcccggttcttgttccagaaactggttgcacgggaatcccagcaccataaaacctcgatcgacccaggctttctgaatattctccaactgctcatattgcggcgttaagccacacttactggcgacattgacaatcaacagcacattaccggcgaacttctccagcgtggtcacttcaccgtcgatatctttcactacggtcgtcagaatggaatcttgcatcgtttctcctgggtgtggtcagtaaaaatcttagcttttaatcatagaccgtctttttgcggttaacgtcctgcttttaacaataaccagataaacaccggcgcacctaacgttgcggtgaccacgccaataggcagctctgcggcagctaatgccaggcgcgctacaatatcggccagcagcaatgcgctcgcccctgccagcgcgcagccgggaagtaatacgcgatgatcggttaaaccacacaaccggagaatatgggggatcaccagaccaataaagccgatagcacccgccagcgccacactgacgccaaccatccagccggtcgctgccaccagcacattgcgccagaaccacaggggtaaacccagttgccgcgcgctgatctcgccaagtgctaacatattcatcggcctggactgacaacagatccacaacaacacggggatcaatgccagcatcagccagctttgccgccagtctacgccgccaaaaccgcccatcatccagtacatcagctgacgcaaatcaacactggtggaaaagtagatagcccacgtcattagtgcgctacagataatccctaatgcaacgccagccagcaataaccgactggtgctaagatgacgacgggcgaaacgtaagagtattaaagtgatgataagcgcgccagcaatcgcacacagccctagcgcccagttggggagttgcccttgcccaagcaataccgcggcgataagccccacgcctgcgccgttagagacgccaagtagtccaggttctgccagaggattttcaaacaacgcctgcattacagcgccggatatagccagcgccgcaccaaccagcaatacagccagcgtacgtggcaggcgaatttgccagacgaacagttcgccacgaggagtaaaccagtcacctgggctgatccattgttcaccggcgcaaaggcttaagagaagcgccagcagcatcaaaacactcaggcataataaccagcgaatattttgtcgctgttgttggcgggcaagtgtcagcatggtatccgttctgctgaagtgtcatggcgttgattttacggtgactcttcgacagtgaaaagaaaaaaggccgcagagcggcctttttagttagatcagattactcgtctttggggctagcgttttcgacccggctttttaacttctgcccgggtctgaaggtcaccacgcgccgtgctgtaatgggaatatcctcgcccgttttcgggttacgtcccgggcgttgattcttatcacgcagatcgaagttaccaaaaccagagagtttcacctgttcgccgttttccagagcgcgacggatctcttcgaaaaacagttcaaccagttctttggcatcccgcttgctaagcccaagcttatcaaacagatattcactcatttcagcttttgtaagcgccataggttcaatccctcaaacttgcctggaatcgctcttttaatgcctctacacatttggcgacggtagcggcaatctcctcttcttcgagtgtacggctggtatcttgcaggatcaggcttatggcgaggctcttatacccctccgcaacacccttaccgcggtacacgtcaaataagtttacgccaactacctgatttacgccaactttcttacattcggataaaatatccgctgcgggaacgttttctgcgaccaccaccgcgatgtcacgacggttcgccgggaagcgagaaatctcgcgcgcctgaggcaccacgcggtctgcgagcttgttccactccagttcgaacaccagagtgcgaccgttaagatccagtttacgttccagttcaggatgaacaaccccaacaaaaccaatacgttcacctttcagataaatcgctgcggattgccccggatgcagtgccggattcgcttctgcacggaactcaacctcattcagtttaccggtcaggtcgagaacggattcaagatcgcctttcaaatcatagaaatcaacggtctcttttgccaggttccagtgctcttcgtaacggttaccgcaaatcacaccggctaacatcagatcctgacgaatgcccaacggtgcctgagtatctggtacgaaacgcagaccgctttcgaaaatgcgcacacggttctgctgacggttctggttgtacaccacggttgccagcaggccagtccacagagaaagacgcattgcactcatttcaacagagatcgggcttggcagcagtaaggcttcaacgcctggatggatcatctgctgcactttcggatcaacgaagctgtaggtgatcacttcctgatagcctttgtcgttgagcagcgttttcacgcgcttgaggctcaggtcagcttcacggtgagtacccataatcaggcttgcctgtaccggctcatccgggatgttgttgtagccgtaaacacgcgcgacttcttcaaccagatcttcttcaatctccatatcgaaacgccagctcggcgcaactgcctgccattcgtctttgccttcggtcacttcgcagccgagacgacgcagaatgtcagttacctgctcatccgcaatatgatggccgatcaggcgatccagtttgctacgacgtagagtgatggttgcacgcttcggcagcgttgcttcgttggtgatatcaattaccgggccagcctcaccaccgcagatgtcgatcagcagacgggtcgcacgttccatcgctttgtgctgcagtgccggatcaacgccacgctcataacggtgagacgcatcggtatgcaggccatgacgacgagcacgaccggtgatagacagcgggctaaagaacgcgcattccagcagcacgttttgtgtttcgtcattcacgccagagtgttcgccaccgaagatgccgcccatcgccagcgccttgttgtggtcggcgatgaccagagtgtcagcattcagcttcgcttcagtaccgtcgagcagcaccagcgtttcgccctctttcgccatccgcaccacaatgccgccttcaatgcgatctttatcgaaagcgtgcatcggctggcccagttcgagcagcacatagttggtgacgtcaacaactgcatcgatagaacggatcccgcaacgacgcagtttttctttcatccacagcggagttggcgctttaacgttaatgccttttaccacacggccaagataacgcgggcaggcttccggcgcttcgactgtaatcggcagcgtgtcgtcgatggtcgcaccaaccggaacgatttccggttgaaccagcggcagctggttcagcacggcaacgtcacgcgcaacaccaatgatgcctaagcagtcggcacggtttggcgtcacgctgatttcgatggtgttgtcatcaagtttcaggtattcacggatatcggtgccaatcggcgcatccgcaggcagttcgataatgccgctgtgatcgtcagaaatgcccagttcagagaaggagcacagcatcccttcagacggttcgccacgcagtttcgccgctttaattttgaaatcacccggcagaacagcaccaatggtcgctaccgctacacgcaggccctgacggcagtttggcgcaccgcagacgatgtccagcaggcgatcgccgccgacattcacttttgtcacacgcagtttgtcagcgttcggatgctgcgcacactcaaccacttcaccaacgaccacgccgtggaagctgccggcaaccggttctacaccgtcaacttccaggcccgccatagtgatttgatttgccagcgcatcgctatcaatcgccgggttcacccattcgcgtaaccacagttcactgaatttcataatctattcctgccttatttaaactgtttgaggaaacgcagatcgttttcgaagaaactacgcaggtcggtgacgccgtaacgcaacatagtcagacgctccatccccatcccgaaggcgaaaccagagtaaacttccgggtcgatgccaacgttacgcaacacgttcggatgcaccatcccgcagcccagcacttccagccatttaccgtttttacccatgacgtccacttctgcagaaggttcggtaaacgggaagtaggaaggacggaagcgaatctgcaaatcttcctcaaagaagttacgcaggaagtcgtgcagcgtgcctttcaggttggtaaagctgatgttggtatcaacaatcagaccttccatctgatggaacatcggcgtgtgagtctggtcgtagtcgttacgataaacacggccaggcgcgatgatacgaatcggtggctgctgggctttcatggtgcggatctgtacgccagaggtctgggtacgcagcaggcgggtagtgtcaaaccagaaagtgtcgtggtcagcgcgcgccgggtggtgaccaggaatgttcagagcatcgaagttatgataatcgtcttcgatttccggcccggttgccacggtaaagccaagctcaccgaagaaactttcgatacggtcgatggtacgggtaaccggatgcagaccgccgttttcaatgcgacgacctggcagagagacatcaatcgtttccgccgccagacgcgcattcagtgcagcgctttccagttccgctttacgcgcattcagcgcctgctgaacctgctctttcgcttcgttgataaccgcaccagctgccggacgctcttctggcggcagctcacgcagggtcgtcatctgaagggttaagtgcccttttttacccaaatattcgacgcgcacattatctaacgcggcaacatcactcgcctggctaatggccgccttcgcactggcaaccagttctgcgagatgactcatggttttcctcattgtgtcagtggtgacactggttcgttggacttagagcctatcccatcaggctattttacttgccattttggtcccgggctgtgctcgaaattctcacgtacttaaatacgctccggtttctccgcgctggccgtgtccagtctggctgcgacaattacacctgatgagacaggctttttatttttcaaaacgcgcatacaaaaaaagcctccactgggaggctttcaggcgctgttttccgtttctcttctcacgcgctagcctcctggattcaggtgctaaagtaaaaaaagaagcggaaaatagcagcattcattgcttgcgttaccttttggtactcttcaaaagacctttattgaaaaggctacggcgataaaagtcaatgttttgatggcgttgaaacgaaaagagggagactagctccctctttcaactggcttatgccagagctgctttcgctttttcaaccagagcggtgaacgctactttgtcgaatactgcgatatcagccaggatcttacggtcgatttcaacagaggcttttttcaggccattgatgaatttgctgtaagaaataccgttctgacgtgctgctgcgttgatacgcgcaatccacagttgacggaactgacgcttacgttgacgacggtcacggtaagcatactgaccagctttgataacagcctggaaggcaacgcggtatacgcgagaacgcgcaccgtagtagcctttagcttgtttcaaaattttcttgtgacgtgcacgtgcaataacaccacgttttacgcgagccatatgtgctctcctgtatctatattctaattaaaaagttaaaaacgttaacggcttatgcgtacggcaggcacgcgattaccaggcccagatcgcctttggaaaccatggctttcggacgcaggtgacgtttacgtttggtcgcttttttggtcagaatgtgacgcaggttagcgtgcttgtgcttaaaaccacctttaccggtttttttgaagcgcttagcagcaccgcgtacggtcttaatttttggcattttaataacttccacttcgcattgttaataaacgaaacaaaggcgaacaaagcctgtgaagcccgaaggctccacagacagtgctacttgaaggccttactgtttcttcttaggagcgagcaccatgatcatctggcggccttcgatcttcgttgggaaggattcgaccactgccagttcttgcaaatcgtctttcacgcgattaagcacttccataccgatttgctggtgcgccatctcacgaccgcggaaacgcagcgtgattttggctttatcaccctcttcgagaaagcgaatcaggctgcggagttttacctgatagtcgccttcatctgtaccaggacggaatttaatttccttaacctggataactttttgctttttcttctgttccttagaagacttgctcttttcatagaggaatttgccgtaatccattatacgacaaaccggcggctcggcgttagggctgatctcgactaagtctactccggcttcttctgctttctccagagcttctctcagactcacaataccaagctgctcgccttccagacctgttaagcgaacttcctgggcgcgaatttcgccattgatacggttagggcgcgccgtttgaactcgttttccgcctttaataccttattcctccaattgtttaagactgcggctgcgaatctcttgttgcagcttctcgatcacttcatttacgtccatgcttcccaggtctttaccacggcgggtgcgaacggtaactttgccactttccacctctttatcaccacagaccagcatatatgggacgcgacgcaaagtgtgctcgcggattttaaagccaatcttctcatttctcaagtctgctttaacacgaatgcccgcattacttagtttttgcgtcaattcgttaacgtattcagactgactatcggtaatattcatgataacaacctgaaccggcgcaagccaggtcgggaagaaaccagcgaactcttcggtcaggataccgatgaaacgttccatgctccccagaattgcgcggtgaatcattaccggtactttacgttcattgtcttcgcctacataagaagcgctcagacgagacggcaaagagaagtccagctgtactgtaccgcactgccatgcacgatcgaggcagtcatacagggtaaattcaattttcggaccgtagaaagcgccttcacccagttgatattcaaacgggatgttgttttcttccagcgcaaccgccaggtccgcctcagcacgatcccacatttcgtcgctgccaatacgtttttcaggacgagtggagagtttgacgacgatcttctcgaagccaaaagtgctgtacatatcatagactaaacggatacatccgttaacttcatcgcgaatttgttcttcagtacagaagatatgcgcgtcatcctgggtaaatccacgcacgcgcatcaggccatgcaggctaccactcggctcgttacggtggcagctaccaaactcggccatacgcagcggcagatcgcgataagacttcagcccctggttgaaaatttgtacgtgacccgggcagttcatcggcttaatgcagtattcacggttctcagaagatgtggtgaacattgcatctttgtagttgtcccagtgaccggttttttcccacaggacacggtccatcatgaacggacctttaacttcctgatactggtactctttcagtttagaacgaacaaacacttccagttcacggaagatggtccagccgtcgttgtgccagaataccatacccggcgcttcttcctgcatatggtacaggtcgagctgtttaccgattttacggtggtcgcgtttcgcggcttcttccaggcgctgcaggtaagcgttaagtgcttttttgtctgcccacgccgtaccgtaaatacgttgcaacattttgttgttgctgtcgccacgccagtaagcccctgccgttttcattagtttgaaatgatggcagaaacgcatgttcggtacgtgcggaccgcggcacatatcgacatattcttcatggaagtacagacctggcttgtcatcatgggcgatgttttcgtcaagaatggagactttgtagctctccccacggttggcgaaagtttcacgcgcttcgtgccagctgactttcttcttaatgacgtcgtagtttttctcagcaagctcatgcatccgcttctcgagtgcttcgacatcttcctgggttaacgtgcggtcaagatcaacgtcgtaataaaaaccgttgtcaataaccgggccgattgccattttggtatgcggccaaagttgtttaatcgcgtgccctaacaggtgcgcacaggagtgacgaatgatctccagaccttcttcgtctttggcggtaatgatgctcagttgtgcgtcgttttcaatcagatcgcaagcatcaaccagttcgccattaacgcgccctgcgatacaggctttcgccagacctggaccaatgtccagcgcaacatccatggggcttacagcgtgatcgtaatggcgttggctgccatcaggaagagttataacaggcattttatatccttatttgcagtggtgacccacacgaaagatcacatacaaagaaaaatttgtttattaacagttcattgcgaaaccatctagccaacaaatgctaaattggttcgcaatcaggtacacaaatgaaagacattaacctctcaccttccacccggttgagcgatgttaacactaaaaaaagggagattgtacctttccgtttcacattgattcgattcgcaattcgtttgtagtgagtacaccagcaaaacgcttaaagaacaactgataacatcacggtgcgtctgaaaggtttactgcgagcggatttacagcagcataaactgaatccagcaaagttcgttgcgtgatttggcggtagtattttaaacgctcatgagattaatgacgaagtggtcatatcacaatgataaaagtgacacaattcttataacaatttttcgtgcacatttcgttctggcgataataattaatcatcatcctcaaaacctccagatatatataaggcgaacagattatgagtcaaaacgatatcattatcagaactcattataagtctcctcatagattgcacatcgatagcgacataccaacaccttcatcagagcctattaatcaatttgcgcgccagctcatcaccctacttgatacctctgacttaagttcgatgctgtcatactgtgttactcaggaatttaccgcaaactgtcgaaaaatatcacaaaattgttattccactgccctttttaccattaactttgccacttcacccatccatacagaaaatatactcattacattacactataaaaaagaaatcatttccttattactggaaaccacgcctattaaagctaaccatttgcgaagcatactggattatattgaacaggaacagttaactgctgaagatcgtaaccattgtatgaaactgtctaaaaaaatccatagagaaaaaaactatacacccaacagtaaatctcaatggtagtgcatgttttttgcaatctccttctgacgctattttttgtcgccatctgtcattgcaatacgcccttgattcattgagaaatggaaaaggcaaagtcaacctgattaaacattactcctccgttgaatccatacagcagcatgtccccttagtccgggacgcggagttcagagcattacttcgccatcctcctgcagggagtcgcgttatcgcgagtaaggattttggcttcgctttagatattttcttttgtcgaatgatggcaaacaatgtcagtcatatgtccgcgattttatatatagacaatcatactttgtcagtaaggctacgaataaagcagtcagtgtatggacaattaaattatgttgtgtccgtttacgacccgaacgataccaacgttgccgtcagagacacccacaggacagcacggggctttctttcgcttgataagttcatcagttcaggtcccgatgctcagacctgggctgatagatatgttcgcaactgtgcaattgctattctgcccctattacctgtgggagttccaggggctattttcgcgggtattgcatcacgaatgccatttgcccctatacatccatcggcaatgttgttaataatggctacaggccagtctcaacagcttattacattattcaaacagttgcccatactccctgaaaaagaaatcattgaaataataactgcgcagaatagcgttggtacacctgctttatttttggctatgatgaacggacatactgacaacgtgaaaatatttatgcaagaaattcagtcactggtagataatcacatcattcatgaagataatctggttaaattactgcaaactaaaagtgctaacgaaacacctggactttatatctccatgttgtatggattcgatgaaataatcgatatctttctgaatgcattaaccactccaatagcacaagagcttttaaacaaaaaactggtgatgagtattttagccatgaaaatacatgatggtgagccaggattatacgccgcaatggaaaataatcaccctttgtgtgtcacacggttcctctctaaaattaatggcatcgcctttaaatacaagttgagcaaagctaacatcatggatttattaaaaggagctacagcacagggaacccctgcattatacatcgccatgagcaagggtaatgaagacgtcgtgttatcttatatatcgacgctgggtgcttttgcaaaaaaacattcttttagtcaacatcagttatttacactattggccgctaaaaatcatgacaacatgtcagctgttcatatagccattcatcataagcattataaaactgtagaaacatattatgctgctattaatgcaatcagccaaagcctgagttttagtgctgatgaaataaagacgtatttataaccagctatttacgatatatatcgatacataattttatttttttcataaaacgcagaaacagtgaccatgtgcacaacgccacccgacggctgtaataacaaaaaatcccttgatgcctgtcccttttgttacactccgttatcacgcacaagagatatgcaggacactggtatgccgactaaacgctttgataaaaaacactggaagatggtggtggtgctactggcaatctgtggcgctatgttgttgctacgttgggcagcaatgatttggggctgagcagtgacaaacgaagacagccagaccgcataacacggtccggcagataattttacatgctgtagcccaggcttaaggttgtccgacggtcggtatgttccggtgcagactctggaggttcagagttccatgtgacgttgtaagccaccttcagtccaaaatgttcattaatagcaacatttaatgcgctttcggagttcagcgttgtgtcttccgcgccaaagacgctaacaccctgcgtaaatttagcgttgtcagtcaactgccatgcataagccccggaggcatagcccagcggctgggtttcactggcattgtcggtatatttgtcgtaacgcacacctggaccgaattcaaagcggaaactgtgtaccgggccattcaaaaactgacgaccataacccgcggtcaacacatcgcgctctcgatagccgttataacggtctgtcagccagcttgcctgaccaaataaatagtcataatcagttaaattaaaacggctacgcccgcccgccgcatatttttcactagaacgctcatcattagaagaagtattactggcgttcccccacaggctccaggcagtggtgtgtccataccaggtcatggtggtgtcagccgtaagactggagcttttcgtattgccactttgtgcaagatatcctgcgttcagattaccttcgaaaggttttttagcgctggcaggatcatccatgacagtaaaaacggaatcatcggcagctgcattcagactcgcaaacatgccccccgccaacataacgatggcaggaactgtcttcaaaagcttcatttatcaagagtccgtacaacaaaaaaagagaccatcgcggtcccggaaactttcttaaggatcaaagattagcgtccctggaaaggtaacgaattataaaaaggcgcgaataacttagcaatgtattcttatttcattttttgaataagcatgtggcgaaaacagatttttatttatatatatttatctgcaaaattttaaataaagctccaataaatcatattgttaatttcttcactttccgctgattcggtgccagactgaaatcagcctataggaggaaatgatggtacgtatctatacgttgacacttgcgccctctctcgatagcgcaacaattaccccgcaaatttatcccgaaggaaaactgcgctgtaccgcaccggtgttcgaacccgggggcggcggcatcaacgtcgcccgcgccattgcccatcttggaggcagtgccacagcgatcttcccggcgggtggcgcgaccggcgaacacctggttagtctgttggcggatgaaaatgtccccgtcgctactgtagaagccaaagactggacccggcagaatttacacgtacatgtggaagcaagcggtgagcagtatcgttttgttatgccaggcgcggcattaaatgaagatgagtttcgccagcttgaagagcaagttctggaaattgaatccggggccatcctggtcataagcggaagcctgccgccaggtgtgaagctggaaaaattaacccaactgatttccgctgcgcaaaaacaagggatccgctgcatcgtcgacagttctggcgaagcgttaagtgcagcactggcaattggtaacatcgagttggttaagcctaaccaaaaagaactcagtgcgctggtgaatcgcgaactcacccagccggacgatgtccgcaaagccgcgcaggaaatcgttaatagcggcaaggccaaacgggttgtcgtttccctgggtccacaaggagcgctgggtgttgatagtgaaaactgtattcaggtggtgccaccaccggtgaaaagccagagtaccgttggcgctggtgacagcatggtcggcgcgatgacactgaaactggcagaaaatgcctctcttgaagagatggttcgttttggcgtagctgcggggagtgcagccacactcaatcagggaacacgtctgtgctcccatgacgatacgcaaaaaatttacgcttacctttcccgctaacaaaaacattcccccagcattgggggaatcatcaccaacctgtcggcaacgcgtttctccgactatgctcaaaagtcatgtgataacaaaggggtgaactatggccagtggcgatcttgtccgttatgtcataaccgtcatgttgcatgaggatacattgactgaaattaacgagttgaataattacctgactcgcgacggttttttgctcactatgacggatgatgagggaaatatccatgagctgggaactaacacttttggacttatcagtacccaaagtgaagaagaaattagagaactggttagcgggcttacccaaagtgcaaccggcaaagatcctgaaatcaccatcacgacctgggaggaatggaatagcaacagaaaataaatggtttttgggcaataatcagtctgtggtgtgcgttagctcgtgtttttacaccgcattcttgcgctaaccttatgatctggcagacaacatgggagagacatcatgtggcaggcaatcagtcgtcttttgagcgagcagttaggtgaaggcgaaatcgaactgcgtaatgaactgcctggcggagaagtccatgccgcatggcatttgcgctatgcaggacatgattttttcgtcaaatgtgatgaaagggaactgcttcccggttttaccgccgaagccgaccaactggagttactgagccgtagtaaaaccgtcaccgtgcctaaggtttgggcagttggcgctgaccgtgactacagttttctggtgatggattatctcccacctcgtccgctggatgcgcatagcgcatttattcttggtcagcaaattgcgcgtttacatcaatggagcgaccaaccacaatttggccttgatttcgataacgcgctctccacaactccacagcccaacacctggcaacgtcgctggagtacgttttttgctgaacaacggattggctggcagttggaactggctgcagaaaaagggatcgctttcggcaatatcgacgccatcgtcgagcatattcagcagcgtctggccagtcatcaaccgcagccttctctgttgcacggcgatttatggtccggcaactgtgcactgggtccggatggcccgtacattttcgacccggcctgctactggggtgaccgagagtgcgacctggcgatgttaccgctgcatactgaacagccgccacaaatctatgacggctatcagagtgtatccccgctacctgccgatttccttgaacgtcaaccggtttaccaactctacacgctgttaaatcgtgcaaggttatttggcggtcagcatttggttattgctcagcagagtttggatagattattagcagcatgatatgggttgaggataatggccgctccgtgcggccttttgattaaataaacccaagcagagaaaagaacacataacctgcagcaatacaaataaccggcaggatatacagactgaaaaactgcaggaaaatagtatggtgcggaacaacaatacgggactcaatttgttcacgcgttagcccctcttcccctttggctttttccagaatgagttgatcttcaacaccttcccgcaagaagcgcgcctggcgactcatccgggcaccggaatcctgcaacgccagtccgacaaaaatcaggatgaaaatcacccagaacataacgttcacgccaccattaaaattgggcgtcggggagttataccagaatagattcaaaaaaggcgtattcgcctgcatcatatcgatcatgacatgagtaaagtcgagcatgaccgcattaatgccttccttgttttcctgccgggtattcataaatttcagcaaagaaatcaatgtagagatcaatgcaggtataaaaatcacccaacccaaaatccttttcaaaacagcaatgcgtccagcttgttgatacgtcatgagttctccttgattaagacgcgtcgtttcacttagtttacctgtagatatctgttttcgcccattctttaaaggcgatatgataggcgcttaatcataagcacggcttaataccttacacataatgctctaaaggagaggttgtaatgagtaccccgcgtcagattcttgctgcaatttttgatatggatggattacttatcgacagtgaacctttatgggatcgagccgaactggatgtgatggcaagcctgggggtggatatctcccgtcgtaacgagctgccggacaccttaggtttacgcatcgatatggtggtcgatctttggtacgcccggcaaccgtggaatgggccaagccgtcaggaagtagtagaacgggttattgcccgtgccattagtctggttgaagagacacgtccattattaccaggcgtgcgcgaagccgttgcgttatgcaaagaacaaggtttattggtgggactggcctccgcgagtccactacatatgctggaaaaagtgttgaccatgtttgacttacgcgacagtttcgatgccctcgccagcgccgaaaaactgccttacagcaagccgcatccgcaagtatatctcgactgcgcagcaaaactgggcgttgaccctctgacctgcgtagcgctggaagatagcgtaaatggcatgatcgcctctaaagcagcccgcatgcgttccatcgtcgttcctgcgccagaagcgcaaaatgatccacgttttgtattagcagacgtcaaacttagtagcctgacagaactcaccgcaaaagaccttctcggttaatgaccaggggcagtgatctcgctgcccctggttctttatctgaaattgcattcaactgacggattaatcgtcaatttaagagaaagagttacaccgtcaccacttccgtgcactgtataaaaatcctatactgtacgtatcgacagtttagtgagttttatcatgacggcggaaggtcaccttctcttttctattgcttgtgcggtatttgccaaaaatgccgagctgacgcccgtgctggcacagggtgactggtggcatattgtcccttccgcaatcctgacgtgtttgttaccggacatcgatcacccaaagagctttcttgggcagcgattaaaatggataagtaaaccgatcgcccgcgcttttgggcatcgtggttttacccacagtctgctggcggtatttgcgctgctggcaaccttttaccttaaggttccggaaggctggttcattccggctgatgcgctacaaggaatggtgctgggttatttgagccacatacttgccgatatgctgacacccgccggtgttcccctgctctggccatgccgctggcgtttccgcttgcctatcctggttccccaaaagggcaaccaactggaacgttttatctgcatggcattatttgtctggagcgtatggatgccccatagtttacccgagaacagcgctgttcgttggagtagccaaatgatcaataccttgcagatccagtttcatcggcttattaagcatcaggttgaatactaaaaaggcaaaaatcacctttctggaataagcaattccatttgaatataagagccagctcacagttctgttaatcttgcgccaacactatgactgctacgcagtgatagaaataataagatcaggagaacggggatgaactttccattaattgcgaacatcgtggtgttcgttgtactgctgtttgcgctggctcagacccgccataaacagtggagtctggcgaaaaaagtgctggtgggtctggtgatgggtgtggtttttggccttgccctgcataccatttatggttctgacagccaggtacttaaagattctgtacagtggtttaacatcgttggtaacggctatgttcaactgctgcaaatgatcgttatgccgttagtcttcgcctctattctgagcgcggttgcccgtctgcataacgcatctcagttaggcaaaatcagttttctgaccatcggtacgcttttgtttaccacgctgattgcggcgctggtcggtgtgctggtcaccaacctgtttggtttgacggctgaaggtctggttcagggtggtgcagaaactgcacgtctgaacgccattgaaagtaactatgttggtaaagtctctgatctgagcgttccgcagctggtcttgtcctttatcccgaaaaacccgtttgccgatcttaccggagccaatccgacgagtattatcagcgtggtaatttttgccgcattcctcggcgtagctgcattgaaactgctgaaggatgatgcgccgaaaggtgaacgcgtcttagccgctatcgataccctacaaagctgggtgatgaaactggttcgcctggtcatgcagttgaccccttacggcgttctggctctaatgaccaaagtggttgcaggttctaacttgcaagacatcatcaaactgggaagtttcgttgtcgcgtcctacctcggtctgctgattatgtttgcagtgcatggcattctgctgggcattaatggcgtgagtccgctgaagtacttccgtaaggtatggcctgtgctgacgtttgcctttaccagccgttccagtgctgcgtctatcccactgaatgtggaagcacaaacgcgtcgtctgggcgttcctgaatccatcgccagtttcgccgcctctttcggtgcaaccattggtcagaacggctgcgccggtttgtatccggcaatgctggcggtgatggttgcgcctacggttggcattaacccgctggacccgatgtggattgcgacgctggtcggtattgttaccgttagttccgcaggcgttgccggtgtcggtggtggtgcaactttcgccgcactgattgtactgcctgcgatgggcctgccagtaaccctggtggcgctgttaatctccgttgaaccgcttatcgacatgggccgtacggcgttaaacgttagtggcagcatgacagctggcacgctgaccagccagtggctgaagcaaaccgataaagccattctggatagcgaagacgacgccgaactggcacaccattaattcttatgctggcaacggtccgttttgtataggggccgttgccttactttttaaatgttccatcgcggcgatgcatacactctcatatttaaacagatcgtcagcgaaaaaaatgtccaacttatcaatacattcctggctcaaactatgtgcctgtaggctgaagcttaaaacctcatacccgagacgttttctaagactactatctggaatactcataatatcttcaagcacaccacttcccattcccggaagatttagtggattaaaaagaagattgatattaagcatacttattatgctaggaaactttaggagactctcatttttttgaatcgcagcaaaaatgctcccgacaggatgtatataattttgttcatagtatatagtccttaaatagtgaataaccaacctgttttttatactgatcaaattggtcattttttctgggcgaaatacagaagtgacatccattccaataaaatctttatttatacctcttatccgaatttcactaccataaagattattaattattactctatatttaacattgtcctgcagatatgtatcaaaactaagtgctggcgctcctggcttactggcatcatagttaatgttagacatataggcaatcatataattaaagttactttctgctatttcatcgcagtcacattgacccgtacttataaagaaagtgagtgctgtcatagtagactgcagcctttctttaaaagagtcgaaagccaggcttttaatatttaaatcaccataattactctgtattaagtttgtagaaaacatctcccgcctcatattgttaacaaaattattatctcatttaaatctaagtcatttacaatataagtttaagagcgacgccacaggatgaactatcaaaaatagctcatcatgattagcaaaacttaaccattttaaaataaataaacaattaaagaaaaaagatcacttatttatagcaatagatcgtcaaaggcagctttttgttacaggtggtttgaatgaatgtagcaacgaaatacagaatttcaggtcatgtaactcccggcaaaaccgggaggtatgtaatccttactcagtcacttccccttcctggcggatctgatttgcccaacgttgggcagattcaggcacagtaaacgccggactgcgcagaaaactctctcccatcagtacaaacgcaacatatttgccacgcagcatccagacatcacgaaagctatccatctttatcgcatgttctggcggcgcgggttccgtgcgtgggacatagctaataatctggcggttttgctggcggagcggtttcttcattactggcttcactaaacgcatattaaaaatcagaaaaactgtagtttagccgatttagcccctgtacgtcccgctttgcgtgtatttcataacaccgtttccagaatagtctccgaagcgggatctggctggtggtctatagttagagagttttttgaccaaaacagcggccctttcagtaataaattaaggagacgagttcaatgagccaacataacgaaaagaacccacatcagcaccagagtccactacacgattccagcgaagcgaaaccggggatggacagtctggcacctgaggacggctctcatcgtccagcggctgaaccaacaccgccaggtgcacaacctaccgccccagggagcctgaaagcccctgatacgcgtaacgaaaaacttaattctctggaagacgtacgcaaaggcagtgaaaattatgcgctgaccactaatcagggcgtgcgcatcgccgacgatcaaaacagtctgcgtgccggtagccgtggtccaacgctgctggaagattttattctgcgcgagaaaatcacccactttgaccatgagcgcattccggaacgtattgttcatgcacgcggaagtgccgctcacggttatttccagccatataaaagcttaagcgatattaccaaagcggatttcctcagtgatccgaacaaaatcaccccagtatttgtacgtttctctaccgttcagggtggtgctggctctgctgataccgtgcgtgatatccgtggctttgccaccaagttctataccgaagagggtatttttgacctcgttggcaataacacgccaatcttctttatccaggatgcgcataaattccccgattttgttcatgcggtaaaaccagaaccgcactgggcaattccacaagggcaaagtgcccacgatactttctgggattatgtttctctgcaacctgaaactctgcacaacgtgatgtgggcgatgagcgatcgcggcatcccccgcagttaccgcaccatggaaggcttcggtattcacaccttccgcctgattaatgccgaagggaaggcaacgtttgtacgtttccactggaaaccactggcaggtaaagccagtctcgtttgggatgaagcacaaaaactcaccggacgtgacccggacttccaccgccgcgagttgtgggaagccattgaagcaggcgattttccggaatacgaactgggcttccagttgattcctgaagaagatgaattcaagttcgacttcgatcttctcgatccaaccaaacttatcccggaagaactggtgcccgttcagcgtgtcggcaaaatggtgctcaatcgcaacccggataacttctttgctgaaaacgaacaggcggctttccatcctgggcatatcgtgccgggactggacttcaccaacgatccgctgttgcagggacgtttgttctcctataccgatacacaaatcagtcgtcttggtgggccgaatttccatgagattccgattaaccgtccgacctgcccttaccataatttccagcgtgacggcatgcatcgcatggggatcgacactaacccggcgaattacgaaccgaacagcattaacgataactggccgcgcgaaacaccgccggggccgaaacgcggcggttttgaaagttaccaggagcgcgtggaaggcaataaagttcgcgagcgcagcccaagctttggcgaatattattcccatccgcgtctgttctggctaagtcagacgccatttgagcagcgccatattgtcgatggtttcagttttgagttaagcaaagtcgttcgtccgtatattcgtgagcgcgttgttgaccagctggcgcatattgatctcactctggcccaggcggtggcgaaaaatctcggtatcgaactgactgacgaccagctgaatatcaccccacctccggacgtcaacggtctgaaaaaggatccatccttaagtttgtacgccattcctgacggtgatgtgaaaggtcgcgtggtagcgattttacttaatgatgaagtgagaagcgcagaccttctggccattctcaaggcgctgaaggccaaaggcgttcatgccaaactgctctactcccgaatgggtgaagtgactgcggatgacggtacggtgttgcctatagccgctacctttgccggtgcacctagcctgacggtcgatgcggtcattgtcccttgcggcaatatcgcggatatcgctgacaacggcgatgccaactactacctgatggaagcctacaaacaccttaaaccgattgcgctggcgggtgacgcgcgcaagtttaaagcaacaatcaagatcgctgaccagggtgaagaagggattgtggaagctgacagcgctgacggtagttttatggatgaactgctaacgctgatggcagcacaccgcgtgtggagtcgcattcctaagattgacaaaattcctgcctgatgggaggcggcgcaattgcgccgcctcaaatgatttacatagtgcgctttgtttatgccggatgcggcgtgaacgccttatccggcctacaaaactgtgcaaattcaatatattgcaggaaacacgtaggcctgataagcgaagcgcatcaggcagttttgcgtttgtcagcagtctcaagcggcgcagttacgccgcctttgtaggaattaatcgccggatgcaaggttcacgccgcatctggcaaacatcctcacttacacatcccgataactccccaaccgataaccacgctgagcgatagcacctttcaagctcgcacttgtcaacacatccagctccgttaagcgtgggaaacagtaagcactctgacggatagtattatcgataaacgccggatgacacatcacctccaggctacgatcaccccgatggcctgcgtcatccagcacttgcaggaacaggctctcactgatctcttcaccgtagaatgcactgctgaatccctgggtagtgcgcaggttgaccggcaaatcaaacgccatctgacgatccgcccgcaacgcaatgccctgctctgccgcaaacctggcaacaatcgggaaaatctgcgggaacatatgcacatgatgatggctatcaagatgcgtaggtttgcgtccaaatagctcaatgaaacgcaaatactgactgacaagctcctgagtaatttcttccagcggtaaagcatcttcttctgccaactgccagatccattttcccagcacaccatcgcgggttaaccccggcatagctgtcagtggcttacccatagtaaggacaaagtgcatccctatggccagactcggttcatcacgactcaactgcaccgcatggtcaatagcctgcccattcaccagcgccgtcgtgctcgtgacaatcccattgcgacaggcctcgataatgccgtagttctgacctttgcttaagccaaaatcatcggcattaacaatcagtaagcgttccataatcagcctcggttaatgtgcttttttaagctctgcgatgcagtcggcaaagtttggcagccatttctcgtgcgccagaatcatctcgcgtgccagcagctcagcatcgcgatcggaatgcaccaacggactaaggtttagcgccagtaacacatcgttaaattctccgctaagtgcggcgttactggcagcaatctcgaagcctttaatggtgtgaatcagccccattactttatcatcgaaatgcgtaatgcgcggatgtggcgtcgcgccatcgcgccccagcttacaggtcatttctactgcccagtctgccggaatattatcaatctgcccatgatgcgggatattaacgtaatgttctgcttgcttgtcgttgtagatagcgttgatcacttcgcatgctgcatcagagtaataagccccaccgcgctgttccagttctttcggcttaactttcagctcaggatttttatacagctcaaaaagttgtttctcgactttctgtactacctgcgctcgtgcgccgcctttgtagtattcgcccatttcaatagccagcatctctttctgcttgaagtaatacagcagataagaacatggcagcagattcaagctacgaattaagccctcactaaatggcagatcgaaaatattttttacagaggacgcttttaactgcccactcgccacaccatcaagcaattcggcaaagcggctcttgccatttatcagcacatccttaatgaacaccatatggttgaggccgaacaaatcgatagataaatcatcgctgtctttcagcatcagaacatcgcgaataaacatcttcatgccgatcggaatattacacacgccgataaagcgtttaaatccggtatgacgataaacggcttcagtgaccattcccgccgggttagtgaagttaatcacccatgcattcggacaaagttcttcgacatcttttacgatgtcaaaaatcaccggaatggtacgcagacctttaaacaaaccgcccgcgccgttggtttcctgaccaagataaccatgacttaatggaatacgttcatccagttcacgcgccggtaattggccaacgcgcagttgggtagtaacgaaatcagcatctttcaatgcttcgcggcgatccagcgttttataaagcttcatcgggacgccagcgttatcaatcatccgttggcagagatcgaaaataatatccagtttcggtttaccaccttcgacatccaccagccataattcgctgaccggcaattcgtgataacgcttaataaatccttccagtaactccggggtatagctgctcccgccaccaatagtgacgacttttaatttctggctcataatttctcccttcagtacagaatactgatatctggcatatctgccccccggacataaataatccagcaacaggacagatatgtgaattgtcaggtataacgacttgctgattaaattcagtcaatttcttacgatagctcttaggcgtaaaggacgttaatttcttaaacgttttaataaacaaactcgggctactataaccggcctcaaacgcaatatccgtcacactatagttggtcatttccagttgttttttggcaaaattaatacggatttcattaataatctgcattggcgttttgccataatatcgttgagtcgctcgcgtcaaatattcctgacttttggcactcaacgccaccatattctccagcgcgctttcactaaactgctctttatcatgcatcttttctaccgtacttttcagccactgcggtacatcatcaatcacctgttcttcgcggtaatgacgtaaacggttaatgacataaaaagtaaccatctcaacaaactcttccagccctgtttcgcggaaattcaaactagaaatcactgtttccacataggtgagaaaagcgttattggtccggtatacctggctagcgacaaagcaataaggcaacaatggcaggtaatgctgctcaaaaaagcgtttactgatcccaacgttcaatatgcgcgtggcaccaaactcataaaaactttgatggtggctacctaacgaaataaaaacaaaatcgccccgttccagtaacacgcgcttaccgttaatctcctggaaataacgcccggttaataccagagtaaattcataatagtcgtgctgatgcagtccgctgatactctcagttttgttatagataaacacatggaagtttttgccattaaacaactgctgttctcgggcagtggcaatttccggcgcgttaatcactggctgcatcatcgactccttatgccttcagtttttcatgaagctcaattaattcagtaatcagttcacgcgcaagcatggacgtcattaaatgatcctgagcgtggaccagcaccagactcactttcatcttaccttcgcccgcatcgccttcaatcagtttcgtctgtaccagatgcgcttcattcaatgccatccgactctgatccatcatggcttttgctgcggcaaaatcgccctgcttcgcctgtttcagtgccgcatacgccaggctgcgcgcttgtccggagttgatgatcagccccatcaccacttcttccagctcttcagcttccgtttgcgtatcgggaatgttatcgagatccatcatacatcgttcctctcttttcttaccggcacgattacccgtaccggcatcgattaaaatttcagggcgttagcgatatcttcttcgctctcttctttatcaatcgcattttgtgctttgttagccaccacaacaaagggcagataaattaacgttgcgatgccaaggttgaagagtgcgaccagcaatgcggcgacgctaccgttggtgttaaagaaggctcccagaccggttggcatggtccacggtgcaatattggtcaccggaggaataatgcccatgtagtacgctgcgagggtgattgccgccagaatcggttgtaccagtacaaacgggataaacatcaccgggttcatgataattggcagaccaaacagaatcggttcgttaatctggaagatgccggacggcagcgccagttttgccacctgacgataatcagcacggcgagaggcgataaagatagccaggatcaggcctaaagtcgcaccactgcccccaaggaaaataaaggagtccagcatcggcttggcccagatatggaaggtcttaccggctgccagcgccgcttcgacggaaccatattgctgataggtcgcgatattttccagtgcccacggcgtcataatgccgttgtccagtgcggtcagcgccagcgcgccatgaataccgaagaaccagagcagtggaacaaagatcacataggcccagcccaccacgctacccaagcttgccagtggggtactgatggtatccataatgatctgatggaagttggtgccccaggtattcaacgcccaggcaataatccccatcacggaaagaataataaagccgggaattaatgcgctgaaggaacggcttacactagcaggtacgctgtcgggcagtttaatgacccaattgcggcggacaataaaggtaaacatttctgccaccaccaggccaataataatcccggagatgatattcgccccacctaaccagtttgcaccaaccgcataggcctcaccgacactatatggggtgacggtcataaatgctgcaacggataacaacccagccgccagcgcatcgactttacgctcttctgccagcgccatgccaataaagaacggtgccattaaagacattattcctaatgttccgttatatacgttgccgccaatacctttcagaccattaagtgtttcaatggtactggcgtcgaggcgaatacctaaggaataaaaaaagctcccctccccaaagcttagaaaaacgttgttaattaatacaaacatggcccccgcaagggttaacggcattaagcgaataaagccatttttgattgcattaacgtgtggctgctttcctattttaactgcaaaagggaggagtaccttttcaaggcttgcaataacattactcatagaaaaatacccttaaaaaccgcaatttaaatattgcggtattgatttatgaaataactctttgacgggaaaatttaaaataaattaatttgctgcggcttttttaatcgctgcaaccgcagccttaagcacgcctaaaccatcgactttgccataaagcaggctgtcaattacttcaaccggtttgttgggtaacaaacgctggatttcgggcaacatataagcaatctgcggccctaataacacgacatcggcattctgacctttttcaccagccagtgtttccggaaatgcttcaataatgaccggaacttcatatttttctgcctgtgcgcgcattttacttaccagtaaagaggtagacatgcccgcagaacaaaacagataaatgtgtttcttttccataaaactgccctcatcgacgattatctgtcagccagacactccgcaagccttaacctgcttccatgctctgggtaacttgcgaaaccaacatgactttttttgtggctgaaaggagtatacggtatagacctgagcaatagtatttctttgaccttataaattgtttctccttgacctgtggttatgaccctcttcacatttcgggcaaataattcgcgaagataattaagaactcaggccaaaaaaaaccggcgcaatggccggtttccgttgttactcaagctttcagacgaattgattacttcgcagcctgtggatcagtgtcgtattcagcacaggtctgataaccggagttgatgacatatccggtatcatctaacgcgacaaagtaggtttctgctttaccatcacgttgacccaggatgtaggtctggcaagtaccgcgagcatggatcatgctcacttcagagctaggtttacccgcaatttgtgcaacctgcgcccggctcatgccttttttgacgtctttcaccacaggctgtacaaactggtctttggtacgatcataagccgtacaacccgccagcatggttaataccgccgctgcactcagaattcctgccatattcttgttcatattccgtcctcttgtttatcagcgtgttagataagcctggaatacattgggcgctttttcaagcccgtgaacgaaacggctccgctttcagaggattcctgtatgacgttttaaccaccattcagcccgctgtcgcttgtcgtttcagtagcaacgggttagctttaaggaagttttgtcttttctgtctggaggggttcaatgacattgcaacaacaaataataaaggcgctgggcgcaaaaccgcagattaatgctgaagaggaaattcgtcgtagtgtcgattttctgaaaagctacctgcaaacttatccgttcattaaaagtctggtgctcgggatcagcggcggtcaggactccacgcttgccggaaagctgtgccagatggcgattaatgagctgcgcctggaaaccggcaacgaaagtctgcaatttattgccgtacgcctgccctatggtgttcaggccgacgaacaagattgccaggatgccattgcctttattcaaccggatcgcgtattaaccgttaatatcaagggcgcggtattggccagcgaacaggcattgcgggaagcaggcattgaactgagcgattttgtccgtggcaatgaaaaagcgcgtgagcggatgaaagcacaatatagcattgcgggtatgaccagcggtgtcgtggtgggcaccgatcatgcagcagaagccattaccggattcttcactaaatatggtgacggcggtacggacattaatccgctgtatcgtctcaacaaacgtcagggtaaacagttactggcggcattagcttgcccggaacacctttataagaaagcgccaacggccgatctggaagatgatcgcccttctctgccagatgaagtggcactcggcgtgacctatgacaatatcgacgactatctggaagggaaaaacgtacctcaacaggtcgccagaacaatagagaactggtatctgaaaaccgaacataaacgccgtccgccaattaccgttttcgatgatttctggaaaaagtaataatttgcacatattggattgtgcgaaaaagagtaatttgttcacgccggatgcggcgtgaacgccttattcgacctataaaactatgcaaattcaatacattgcaggagtcgaataggcctgacaggcgtagcacgtcagacggtgtaacctttgtcatcgacccgcctcttttttaatcgcttcccgcctgttacactggatagataaccagcattcggagtcaacagtggtacggcgtttaacttctccgcggctcgaatttgaagctgcggcaatttatgaatatcccgaacatttacgtagtttccttaatgacttacccacccgaccaggggtgtatctgtttcatggtgaaagtgacaccatgccgctctatatcggcaaaagcgttaacatccgcagccgcgtcctttctcatttacgtaccccggatgaagccgccatgctacggcaatcccgacggatcagctggatatgtaccgccggtgaaatcggcgctctgctccttgaagcgcgattaatcaaagaacaacagccgctgtttaataaacggttgcgccgcaatcgccagctctgtgccctgcaattaaatgaaaagcgcgtcgatgtggtgtatgccaaagaggtggattttagtcgagcccccaacctgtttggcctgtttgccaataggcgcgcagctttgcaagcattgcagaccatcgctgatgaacaaaaactttgttatggcctgctgggactggaaccgttaagtcgcggtcgtgcatgttttcgtagtgcgctaaaacgttgcgccggagcatgctgcggtaaagagagccatgaggaacatgcgctacgcttgcgccagtctctggagcgtttgcgggtggtgtgttggccttggcaaggggcggtggcgctgaaagaacagcacccggaaatgactcaatatcatattattcaaaactggctgtggctgggggcggttaatagcctggaagaagcgacaacgttaattcggacacccgccgggtttgatcacgacggttataaaattctttgtaagccgctgctttccggtaactatgaaattactgaacttgatccggcgaatgaccagcgagccagttgattactgaacttgatccgggctatgaccagcgagccagttgatttcactgaacaacagtttaccttgcggttgtaaaagccgcagggtgtgcctgccatcgaaccagcacgcgccctggtcggtagtgagcaatttatcgcccagttgccacgccccgttaatcacaaacaccaccccgccgcgactgccaaaggtagtaaacgtacgttcggcaattctgactttcgccttacagacatccaggcgtgtcatgatgttgaaatccatgctcatctgccctgccgtcagtttcgcttttaccacctggtccgctgcaaaggcaaaaggctggaacggttttaaggtatggttaaagcggtctgcgctttcaaggagcatctcgccgccttccagcaacgtcactatcctttccatgccgggaaacaaagaaaactccccattcgccgcgatggatgcaatgctggcacgccagtaaaaatcacgttttgccggtgggaacgtgcaaatttcgcgcgtttcaccggcagcatttcgccacagattcacgctcattttacgcatatcaaagtattccatactcgctcccggcccgttcttttcattgttatcgttcaggtaaccgtggatggttatcggcaactcgggtgatttacgttagtggtgatcaggctttttttacaactgtttgagaagagaaaagaaaaccgccgatcctgtccaccgcattactgcaaggtagtggacaagaccggcggtcttaagttttttggctgaaagattattcagcagttgcaggcattttaccttttgccgctggacgttctgtcagacgcttctcaaaattagcattaaattgctttttctgttccggcgtcaggatgttgtaaattttgttctgggtttccatgtgcgccagcatgttagctttgcgctgttcttccatttttgcgatctgcgcttcagcttttactttatcgaaggtatcgctggcaatgatgtcatgcattgcgcggcgttcttccagcggcggacgtttcatctggtcacgctggcctttcatgatttcgcggatctgctgtttctgcgcgtcggtcaggttcaggtctttgaacatcatgtcctgatgcggaccgaacttgcctttgtggtgcatcatcggcttcgcgtcagccggtgctgcggtagtggtgtctgcggcatgggccaggttagccgcgccaagagccagggtagaggcaacaaacagtgcagttaatttacgcatattctatatccttcctttcagttatttattacggctttcttaagtagcgtgccgtgttgacgagattaactttactgactttagcgtcaattaatcagagcaacggtaaaacaatgaaagtgtaaaaaacacttttgcgccaattatggagaaaaaaagaaaatttgatggagagtgatgagagaatattacaacacgatgattttgcagagattatgaagaactataccggatgactggtgataaataaagcaaataaccaggattaatctgtattaatttataagaaagcaacttaatacccgcagaatgatttctgcgggtaagtattagcttattttttcgagcattaatcccgcgcgtaatcccaacgctaccaacggattagggaataacacatactctacatcatgggttacggtaaaacgttcctctccgtcctgcgccagcaatgttcctttctcaaacggcataaaattcagcgtgtcacttgccatatgcatttcgaaggacgggctgtggcgagtaatttggctaaccacccgataacggagcggcggtgttctcacgataccgacactctcaccagatagcagcgcagcaattgcgctggcagttactgcaaactggcgaagatcgttttgcccaaagggcaacgctttgccaagttccagcgtacaggccagcgcgccaaaatgtctggcgctgaaatgggtaaacgtaccaccaggttcctgatggaacaccagcgcctccagccccgccgcacccagccacgtcagaaatttctcgtcccagggaatgtcgcgttgcggtaatacaccgaactgcggatgcaaggagccacgaattgcggtatgtagatcaaggtgccagcgcacagattctttgccctggtcataaaaatcttccaggcactgttccagttcgcgcgcccgacaggtttctccgctttcagcaaatagctgccaacgaccgccaaacattcgattcatatcgctatggcaataacgtttcccttgcttcagcgcaggaggattcccgaggatcaccagcaaccgccaacgtaacgggatctcgccgtgagatatcgcgccaagcaacgcgtccagcatctccacaggtgccgtctcattaccgtgtattcccgcactaatcaccagtgcgccttgcggtggcgttaatggcgtcagttccagcacaccatcgcccagccagcgccagcgaacgccgttgatttctcgctcggtgataaccggttttttacccgttaaggtcagagcaagaaaattatccattgccccctccctcgcgctggaacggataaacgctaccgagattcagtaattggctcaatacatccagtgcttcccgcccttcgcgcagcaattgcgggtcggccagatcggcagcagtaaggcgatcgcggtagtaacgatccacccagtcattgagcgcattaaacagcgtatcgttcatcatcaccgccggattcaccgcccggcgttcttcttctgtcaataccacccgcaaccgcaggcacgccgggccgccgccattcgccatgctttcacgtaaatcaaagacttttagttcgctaatcgggttgtcagcggcaaggagttcattgagataaccccatactccggcgtgttcccgacactcctgaggcagcaccaacatcatggaaccatcatcgcggctcagcagttggctgttaaacagataggtagacaccgtatcagacacggaaacctgagttgccggaacttctatcgccataaaaccattgacccgcgcacgcaggtttgccagtaactgactctggcgagcgaacgcctgttggtggcaaaacagcacctggcggttactcacggcaatcacgtcattatgaaaaacgccctggtcgataacgtccgggttttgctgggcgaaaatcacctgttggggattcacctgattcagccttgccaccgcctcgctggcttcgcgagtctgtcgcgccggataacgggaaggccgggtatcattgccttcttctcgcccgtagacaaaaagttgcatacccggttcaccgtaatgaccgccgagacgattgtggtttgccgccccctcatcaccgagcaacgctacctgtggcaacgcgctatggacgctaaatttctcttcgtcgttaaaaatcgcttttaacaggctttcagtgacgggcgcttccaggctacggtgaaatttattgttcaggttggcaacggtgagatgcactttgccatccagcgtatcggcagatggcgcgatcgttgccgcattggctacccacattgggctagcggaactgacgctggaaagccagtgcggtgcctggcgtgcaactttttccagtacctgctcatcgctaccactgaatcccaactgacgcagcaccggaataaacggacgctcgtgcggcgggatcacggcctgggggaatcccgcatcggcaagggctttcattttcagtaagccctgcttcgccgccagtcgcgggttagacacctgaaaacggtgacgggtagaggcttcattaccaaagctcaggcccgcgtaatgatgcgtcagccctaccagcccgtcgaaattgacttcccaggcgttcatcgcaccacctcatcggaaaaatccagcccggggttaagcgtggcgggcaatgttaagctgtcgctctccaggctcgccatcggccatgcgcagtaatctgcggcataccaggcgctggggcgatggttaccggaagcaccaatgccgccgaatggcgcggtactggcagcaccggtaagcggtttgttccagttaacaatccccgcccgcgcctccagcaacagttgatcgaacttttcccgctcgggggaaaccagaccgcaagagagtccgaagcgagtgttattcgccattcgaatcgcttcatcgaaagtatcataacgccagacgcgcaataacggtccgaacacctcttcatctggtacgccagcaacgcctgtcatttcaatgatccccggcgtcagcaagcttgtccctgcttgtaataagcgcggcgcaagcaggggtcgtccgcccatcgcttccagttgctgccatgcagtaaccacctgctgtgcggcctgttcagaaatcagcccgccaataaacggctgcggttcgtcatcccagttgcccggcgttaatcgctggctgacggcaaccagacgagcaagaaacgcatcgccctgcgccccgcttttcagcaataaacggcgggcgcaggtgcagcgttgaccggctgtgacaaacgcgctctgaatggtcagatggacagccgcgtcgatatccgccacctcatcgataattagcggattattaccgcccatctcaagggcgagaattttctccggctgaccggagagctggcgatgcaactggtagcctgtattggcgctaccggtaaacagcaaaccgtcgagatcctccagcgcactcagcgcctgacccgtttcacgcccgccctgcaccaggttcagcacgcctggcggcaagccagcctgctgccataaacgcattaccgcttcgccactccacggtgtcagttcgctgggtttaaagataatggtgttacctgccagcaatgccggaacgatatgtccgttcggcaaatgaccagggaaattatacggcccaaacaccgccagcacgccgtgcgggcgatgtcgcaggctcgccgcgccgtccggcatttcactacgctgctcgccggtacgaacgtgatacgccttaatacttatcgcgattttattgatcatcgccgtcacttcggttgccgcttcccagcgcggcttacccgtttctctggcaataatcgcggttaattcggctttattgctttccagcagtgcggcaaagcgttcgacaacggcatgacgttcagcaaaactaagccgcgcccagcgcggaaacgccgcacgggctgcccgacaagcctgctcgacctgagcggcatcggcatcattgccttgccataacacctcgccgcttaccggattacgcttcacacggcttgcgccctggcccgttatccagtcaccgttaatccataaagtcatgctgttttctcctctgcgcacaggcgcaccagacgaacgcgatccccggcgtggcatttgagggcatccagttgtgcggcggttaaaatcaaacgctcggttgccggatcggtacgcaccagcaccacgcggaaatggtgataattttcattggcgaccaggcaggctgggaaatcgccctgcgcaggctgcccttctgccacttccaccagccgacttttacggatggcgcgcacgcggtcgatgtcacactcaagcgtcggcccaccgtcaaagatgtcgatatagttacggtagcgaaaaccttctttctccagcaccgcgcgggcaggcgcggtttgcggatgtacctgaccgatgacgtcctgggcttcctgggataaaaagtgggtatagatcggatgtttcggcatcagttctgcaataaatgccttttgcccggtgccgcagagaaaatcggcgcggctaaaatccatgctaaagaagcgtttaccgaggctttgccagaacggactatagccgtgttcgtcaatcaccccgcgcatttcagcaaccactttgtcattaaacttgtcgcgaaaagccgccataaacataaagcggcttttgctcagcaaatagccgttgccctctttgcgccagtccgggtcgagaaacagcgtgcacagctcgctgctgccggtgtgatcgttactgagaaacagcgtcggcaatgcgttatagacattcagctctttactggcgtgaaccaacgtgccgacgcgatagttgtaccagggatcgttcagcccaaccgccacctcaatggcacaaatccccgccacggtgcctgtctcgctatcttccagcacgaacacatagccctgctcacttttgggcagttcgccttgccaggttttgattgccctttcgatacgcgcgctaagcgtggcttcattggcgggaaggctcgtcaggccgccgcccgttttgctggcaagctgcatcagcgcgctgacatcacttcgctcaacgggacggatgaccatcatgatgaacctcggctaacaaattatttcaactactacctcggctaacaaagtgttcgcaagcagctgcaaagcgatccagtccggtcgtcacctcttcttcgctgacattgagcgcaggcgcaaaacgcaccacgttgccacccgcaatcagtaccatcacgcctgctttcgccgcttcctgagagatctgtttcgcttgcccggcgtaatcggcattcagtacacagccaatcagcaaacctaagccgcgaacttcactgaacaaaccatagcggtgattaatagtattaagacgctcaacaaaccagtcgtgacgctgtttaacgccattaagcatctctggtgtgttgatgagctccagcactttgcctgccaccgcgctggccagcggattaccgccataggtggtgccatgagtgccaacggtcatcacgcgggcgcactcttcggttgccaacaacgcaccgaccgggaaaccgccgcccagcgctttggcggtagttaacagatcaggcgtcacgccgtagtgcatataggcatacagttccccggtgcgcccgacgccggtttgtacttcatcaaaaatcaacagcgcattgtggcggttacacaattcacgcagaccttgtaaaaacgcgttgctggctggcaccacaccgccttccccctggatgggttcgacaatcaccgcacaggtagagtcgtcaatcagcgcgctggcagagttaatatcgttatatgcagcatgacgaatatccgccggcagtggcgcaaaatcctgactataggctggctgcccacccgcactgacagtaaacagcgtgcgaccatgaaacgcatttttgaacgccacgatgccgctcttatggctgccgtagcggtcgtgagcgaatttacgcgccagttttagcgccgcttcgttggcttccgcaccggagttacaaaagaagacgcgatcggcaaacgtggcgtcgatcaattttttcgccagtcgcagtaccggctcgttggtgtaaccgttgccggtatgccagaacttactcgcctgttcgttcagcgcttcacgcagttccggatgcgcatggcccagcgcgttcaccgcaatgccacccgcgaagtcgatatactctttcccctgctgatcccacaagcggctaccttcgccacgtaccggtataaagggtgccggagcgtaaacaggtatcatccattcatcaaagttttcacgcgtaattggctgagacatagcgacctctacagtaaataattcgttatttatatgttaataataagtaatgtttgcgctgtaaatgtagattgcagggttcgtgccagccagtgataaaagtgcataaacggcggaggctaactggaaatcaaggagttataaccaaaccatatgcatttaaagtgcatataaagtgaatacgtttgcgatgtgggtgaataaaaagaataaaaaacgcaatgttatgcagaagtaaaatataattctggaattgtgatcattgacgaaatttactggaaattactgcgccattctgacgcagcgcgcaccaaaagcgggcatttttttgcgccatcgttgacatcattaacaaccatcgatcaaatcacttaacaacaggcggtaagcaacgcgaaattctgctaccatccacgcactctttatctgaataaatggcagcgactatgaaatttgtctcttttaatatcaacggcctgcgcgccagacctcaccagcttgaagccatcgtcgaaaagcaccaaccggatgtgattggcctgcaggagacaaaagttcatgacgatatgtttccgctcgaagaggtggcgaagctcggctacaacgtgttttatcacgggcagaaaggccattatggcgtggcgctgctgaccaaagagacgccgattgccgtgcgtcgcggctttcccggtgacgacgaagaggcgcagcggcggattattatggcggaaatccccagtctgctgggtaatgtcaccgtgatcaacggttacttcccgcagggtgaaagccgcgaccatccgataaaattcccggcaaaagcgcagttttatcagaatctgcaaaactacctggaaaccgaactcaaacgtgataatccggtactgattatgggcgatatgaatatcagccctacagatctggatatcggcattggcgaagaaaaccgtaagcgctggctgcgtaccggtaaatgctctttcctgccggaagagcgcgaatggatggacaggctgatgagctgggggttggtcgataccttccgccatgcgaatccgcaaacagcagatcgtttcagttggtttgattaccgcagtaaaggttttgacgataaccgtggtctgcgcatcgacctgctgctcgccagccaaccgctggcagaatgttgcgtagaaaccggcatcgactatgaaatccgcagcatggaaaaaccgtccgatcacgcccccgtctgggcgaccttccgccgctaatttagcagctctcctggctcaaactgggtcaggagaattaaccttgagaaaaatcaacaaactgtcagtaatgatttgttgcctgccgtcctttgttataccgtctctgcgtttttagttgtctgaccacttctctattatcaagtttgatataggaaactccacgatgaacgctgagcgtaaatttctttttgcctgtcttatttttgcgctggtcatttacgctatccacgctttcggtttattcgatctgctcaccgatttaccccacttacagacactcatccgccagagcggatttttcggctatagcctctatattctgttattcatcattgccaccctcttgctgttaccaggaagcatactggtgatcgcgggaggaatagtttttggcccgctcttagggacactactcagtttaattgccgccacgctggcctccagctgcagtttcctgctggcgcgctggctgggacgtgatttactgctgaaatacgttggccatagcaataccttccaggccattgaaaaaggcattgcgcgtaacggtattgattttcttattctgacccgcttaatcccgttgtttccttacaatattcaaaattacgcttacggattaaccacaatcgccttctggccttatacccttattagcgcactcacgaccctacccggtattgttatttataccgtgatggcaagcgatctcgccaatgaaggcattacgctgcgctttattttacaactctgtctggcgggcctggcgctgtttattctcgtccagctcgcaaaactctacgcccgacacaaacatgtggatctgtctgctagccgccgcagcccacttactcacccaaaaaatgaaggataaaacgatgttgcaacattatagtgtgagttggaaaaaaggactggctgcactctgtttactggctgttgctgggcttagcggctgcgatcaacaagagaatgcggcggcaaaagtggaatacgacggacttagcaacagccaaccgctgcgtgtcgatgccaataaccatacggtaaccatgctggtgcaaattaatggtcgtttcctcaccgacgacactcgtcacggtattgtgtttaaagatggctccaacggacataaaagcctgtttatgggttatgcgaccccgaaagcattttatgaagccctgaaagaggcaggtggtacgccgggcgaaaacatgacgatggataataaagaaacgactcatgtcacaggcagcaaactggatattagcgtcaactggcaaggggcggcaaaagcgtattccttcgatgaagtgattgttgacagtaatggcaagaaactggacatgcgctttggcggtaatttaacggcagcagaagagaagaaaacgggttgcctggtgtgtctggatagctgcccggtcggcatcgtcagcaatgcaacatacacttatggtgcggttgaaaaacgtggtgaagttaaattcaaaggcaatgccagtgttctcccggcggataacacgctggcaacggttacctttaaaatcgccgaataaagccaggataaaggatgatgatgatgcaaagccgaaaaatctggtactaccgtataaccctcatcatcctgttgttcgctatgctgctggcatgggcgctgcttcccggcgtccatgagtttatcaatcgcagcgttgcggcgtttgccgccgtggaccaacagggtatagaacgctttattcagtcttacggcgcactggcggcagttgtcagcttcttgttgatgattttgcaggccattgctgcaccgctacctgcgtttttgatcacctttgccaatgcgagcctgtttggcgcgttctggggcggcttgctgagctggaccagtagcatggccggcgcggcgctgtgcttttttatcgccagagtgatgggccgcgaagtggtggaaaaattaaccggcaaaaccgtgcttgacagtatggacggctttttcactcgctacggcaaacacaccattctggtctgtcggttattgccttttgtccctttcgatccaatcagctatgctgccggtttgactagtatacgttttcgcagcttttttatcgccaccgggcttggtcagttaccggcaactattgtttattcctgggcgggcagcatgttaacaggcggtactttctggtttgtcaccggactgtttattctgtttgccctgaccgtggtgatttttatggcgaagaaaatatggcttgaacgccagaagaggaatgcctgatgggtttaccgccgcttagcaaaattcctttaattttacgtccacaggcgtggctgcatcgtcgccattacggcgaggtgctaagccccattcgctggtgggggcggatcccgtttatcttttatctggtgagcatgtttgttggctggctggagcgtaaacgcagtccgctcgatccggtagtacgaagccttgtcagcgcgcgcattgcgcaaatgtgcctgtgtgagttttgtgtggatatcaccagtatgaaagtcgccgagcgcaccggcagcagcgataaactgctggcagtggctgactggcggcaaagcccgctctttagcgatgaagaacggctggcgctggagtacgccgaagccgcaagcgtaacgccgccaacggtcgatgatgccctgcgtacccgactggctgcgcattttgacgctcaggcgctcaccgaactgacggcattgatcggcctgcaaaatctgagtgcccgttttaattctgccatggacattcccgctcaggggctgtgccgtattcctgaaaaacgttcttaaggagagatgatgcgccattgtgggtggttgctgggattgttaagcctgttttctctggcaacacatgccagtgactggcaagaaattaaaaatgaggccaaagggcaaaccgtctggtttaacgcctggggcggcgataccgcaattaaccgctatctcgactgggtgagcggcgagatgaaaacccattacgctataaacctgaagattgtccgtctggcggatgccgcagacgcggtgaagcgcattcagaccgaagccgcagccggacgtaaaacgggcggcagcgtggatctgctctgggtgaacggcgaaaacttccgcaccttaaaagaggccaatttattacaaacgggctgggcggagactctgcccaactggcgctatgtcgacacacagctgccggtgcgggaagatttttctgtgccgacacaaggtgcggaaagcccctggggcggcgcacaactgacgtttatcgcccgccgcgatgttacgccacagccaccacaaacgccgcaagccttactggagtttgctaaagccaatcccggcacggttacctatccgcgcccaccggactttaccggcacggcgtttcttgaacagttgctgattatgctgacgcccgatcccgccgcattaaaagaagcgccggacgatgcgactttcgcccgtgtcactgctcccttgtggcaatatcttgatgtgctgcatccgtatttgtggcgcgaaggaaaggatttcccgcctagtcccgcgcggatggatgctctgctgaaagccggcacattgcgcctgagcctgacctttaaccccgcgcatgcgcagcaaaaaatcgccagcggcgatttgcctgcaagcagttacagttttggctttcgcgaggggatgattggcaacgtgcatttcgtcaccattcctgccaacgcgaatgccagtgctgcggcgaaggtagttgccaatttcctgctcagtcccgatgcgcaactgcgtaaagcagatcccgctgtctggggcgatccttctgttctcgatccgcaaaaactgcctgacgggcagcgcgaaagtttgcaaagtagaatgccgcaggatctgccgccggtactggctgaaccgcacgcaggttgggtaaatgcgctggaacaagaatggctacaccgttacggtacgcattaatctttttgctgtgggcgatggtggcggtgatttatgcaccgctgatcccggcagctctcacgctgataagccctgctttgagcttgacacactggcaggcgttatttgccgatccacagttaccgcaggcattactggcaacgctggtgagcacaaccatcgcggcggtcggggcattgttgattgccctgctggtgattgtggcgctgtggcctgggccgaaatggcagcgtatgtgcgcccgtctgccgtggctgctcgccattccccatgtggcttttgccaccagcgcccttctgctctttgctgacggagggctgctttatgactatttcccgtatttcactccgccaatggaccgatttggcatcggtctgggcctcacccttgcagtgaaagaaagcgcatttctgctgtggatcttagcagcagtattgagcgaaaaatggctgttgcagcaggtcattgtgctggatagcctgggctacagccgctggcaatgcctgaactggctgctgttgccctccgtcgcgcctgcgctggcaatggcgatgctggcgattgttgcctggagcctgagcgtcgtggatgtggcaattattctcgggccaggtaatcccccgacgctggcggtaattagctggcagtggttaacccagggcgacattgaccaacaaacaaaaggcgcgcttgccagcctgctgttgatgctgttactcgccgcctacgttttgctgagctatctgctatggcgcagctggcggcgcactattccccgcgtagatggcgttcgcaagcctgccacgcctttattgccgggcaatacgctggcgatttttttacccttaaccggtgtgctgtgtgtggttctgctggcgatcctcgcggatcagagcacgatcaatagtgaagcgctcatcaacagcctgacaatggggctggtggcgacattcatcgctttgctcctgttactgctgtggctggaatgggggccacagcgtcgccagttgtggctatggttgcccattttattacctgctctgccactggtggcgggccagtacacgctggcgctatggctgaaactggatggaagctggacggcggtggtctgggggcatctgctgtgggtgatgccgtggatgctgtttatcctgcaacccgcctggcagcgcattgatagtcggttaattttgattgcgcaaacactgggctggagccgggccaaaatcttcttttacgtgaaatgcccactcatgttgcgccctgtgctgattgccttcgcggtgggatttgcagtcggtattgcgcagtatatgccaacgctgtggctgggcgcggggcgttttccgacgctcaccactgaggcggtggcattaagcagcggcggcagcaacggtattctcgccgcccaggctttatggcaactgctattaccgcttattatttttgccctgaccgcgttagtcgcaaaatgggtaggttatgtcagacaaggactccgctaatgctctgcgtgaaaaatgttagcctacgtttaccagaaagccgcttgctgacaaacgttaactttacggtggataaaggtgacattgtcacgttaatggggccgtctggctgtggaaaatccactctgtttagttggatgattggtgcactggccgaacagttttcttgtacaggtgagctatggctcaatgagcaacggattgacatcctacccaccgcacagcgtcagattggcattctttttcaggatgcactgttatttgaccagttcagtgtcgggcaaaatttactgctggcgctaccggcgacacttaaagggaatgcccgacgtaatgccgtgaatgatgcacttgagcgtagtggccttgagggagctttccatcaggatcctgccactttgtctggcggtcagcgagcgcgcgttgctctactacgcgcccttctcgcccaaccaaaagcgttactcctggatgagccattcagccgtcttgatgtggctctgcgcgataattttcgccagtgggtgttcagcgaagttcgcgccctggcgatccccgtcgttcaggtaacgcacgatctccaggatgttcctgctgatagttctgttctggatatggcgcagtggagtgaaaattacaacaaactgcgataacgcaaagtttttctcaatgcgtcagttcagaatggcgcactcaaaactacaatgtcgggattttcgatgaaacgtgtttctcaaatgaccgcgctggcaatggctttagggctggcttgcgcttctagctgggccgctgaactggcgaagcctcttacacttgaccagcttcaacaacaaaatggcaaagcgatagatactcgccccagcgcgttttataacggctggccacaaaccttaaatggcccttctggtcatgaacttgccgccttaaacctctctgccagctggcttgacaaaatgagcaccgaacagctcaacgcgtggatcaagcaacataacctgaaaaccgatgctccggtggcgctgtacggtaatgacaaagatgtcgacgccgtcaaaacgcgactgcaaaaagcaggtttaacgcatatctccatcctgagtgacgcgctaagcgaaccttcccgtctgcaaaaactgccgcattttgagcagctggtttatccgcaatggctgcacgacctgcaacaaggtaaagaggttacggcgaaacctgccggtgactggaaagtcattgaagcggcctggggcgctcctaagctttaccttatcagccatattcccggcgctgactacatcgataccaacgaagtggaaagtgaaccgctgtggaacaaagtttctgatgaacaactaaaagcgatgctggcaaaacacggcattcgccatgacaccacggtcattctgtatgggcgtgacgtatacgctgcagcgcgtgtggcgcagattatgctttatgctggtgtgaaagatgtgcgcctgctggatggcggctggcaaacctggtccgacgcgggactgcctgttgagcgcggaacgccaccgaaagtgaaagcggaaccggatttcggcgtgaagatcccggcacaaccgcagttgatgctcgatatggaacaggcccgtggactgctgcatcgccaggatgcaagcctggtgagcattcgtagctggccagaatttatcggtacgaccagcggttacagctatattaaaccaaaaggtgaaatagccggcgcacgttggggacacgctggtagcgacagcacgcatatggaagattttcataacccggatggcaccatgcgcagcgccgatgatattaccgctatgtggaaagcgtggaatatcaaaccagagcagcaagttagtttctactgcggcaccggctggcgcgcgtccgaaacctttatgtacgcacgcgccatgggttggaagaatgtttccgtgtatgacggcggctggtacgaatggagcagcgatccaaaaaatccggtagcaaccggtgaacgcggcccggacagtagcaaataacattgcaattactgacgctggaggctcttcagcgtcagatacccactccacacccgcgtaaaggtcgtcatccagcacaacgcaccgaagatccacgcaaaccacgcaaaccatgcagggaataaacatcccagcacaaacagtaagatcgtttctgtgccttcggttaatccccccagatagtaaaagctcttatgtgcataaccggggttatcaatctgatgttttgctgccagtgcagcaaaggcgagaaaactgctgcccgtgccgataaacgcaaacaacaaccagccgcctgccagcgcattttgctccggtgcagcaagaataaagccaaacggcaccagcgcgtaaaagagaaaatcgagagaaatatcaagaaagccgcccgcgtcggtaagctctctgcgccgcgccagcgcaccgtccagaccatcaagcagcctgttcaacaaaatgacgactagcgccgccagataccagcccagcgccagaaacggcagagccagcacgccgatggcaaatcccactaatgttaaaccatctggcgtaatgcccggtttatcaagaacccgcacgcactgatgcaacaacggtttaatccggggatgaagatggcggtctagcacaggcactccttaaatataaagcctttctgattgagcaacagtgcggatattatggcatttttcgcttatctgcccgtgtgtaatttatgaaaatgattgaagttgttgccgccatcattgaacgtgatggcaaaattttactcgcgcaacgccccgcccagagcgatcaggcgggattatgggagtttgccggtggtaaagtcgagccggatgaaagtcagcggcaggcgctggtgcgtgagttacgcgaagaactgggcatcgaagcaactgtgggtgaatatgttgccagccatcagcgagaagttagcgggcggattatccatcttcatgcctggcacgtacccgacttccacgggacgttacaggcacatgaacatcaggcgctggtctggtgcagtcctgaagaggcgctgcaatatccgctggcccctgctgacattccattattagaggcgtttatggctttacgcgccgccagaccagcggattaattatggctttacgcgccgccagaccagcggattagtgctaagggttttgtcatcacgctggcattgcagcagtattccttcggctttaattaccgccccttcagaataattttgatcctgataaacgcagcactgagtacagggctgcgcactctgcccgccactactgaacacttctggcggtacgtttacctccacgtccggacgataatgcgggttagccagtgcaattaatggaaatgctaatactacggcgaacaatgctcgactcacagggaactccttaacgttattgtctctgctactgataacggtagccgggtggcaaaactttagcgtctgagttatcgcatttggttatgagattactctcgttattaatttgctttcctgggtcatttttttcttgcttaccgtcacattcttgatggtatagtcgaaaactgcaaaagcacatgacataaacaacataagcacaatcgtattaatatataagggttttatatctatggatcagacatattctctggagagtttcctcaaccatgtccaaaagcgcgacccgaatcaaaccgagttcgcgcaagccgttcgtgaagtaatgaccacactctggccttttcttgaacaaaatccaaaatatcgccagatgagtttactggagcgtctggttgaaccggagcgcgtgatccagtttcgcgtggtatgggttgatgatcgcaaccagatacaggtcaaccgtgcatggcgtgtgcagttcagctctgccatcggcccgtacaaaggcggtatgcgcttccatccgagtgttaacctttccattctcaaattcctcggctttgaacaaaccttcaaaaatgccctgactactctgccgatgggcggtggtaaaggcggcagcgatttcgatccgaaaggaaaaagcgaaggtgaagtgatgcgtttttgccaggcgctgatgactgaactgtatcgccacctgggcgcggataccgacgttccggcaggtgatatcggggttggtggtcgtgaagtcggctttatggcggggatgatgaaaaagctctccaacaataccgcctgcgtcttcaccggtaagggccttagttttggcggcagtcttattcgcccggaagctaccggctacggtctggtttatttcacagaagcaatgctaaaacgccacggtatgggttttgaagggatgcgcgtttccgtttctggctccggcaacgtcgcccagtacgctatcgaaaaagcgatggaatttggtgctcgtgtgatcactgcgagtgactccagcggcactgtagttgatgaaagcggattcacgaaagagaaactggcacgtcttatcgaaatcaaagccagccgcgatggtcgagtggcagattacgccaaagaatttggtctggtctatctcgaaggccaacagccgtggtctctaccggttgatatcgccctgccttgcgccacccagaatgaactggatgttgacgccgcgcatcagcttatcgctaatggcgttaaagccgtcgccgaaggggcaaatatgccgaccaccatcgaagcgactgaactgttccagcaggcaggcgtactatttgcaccgggtaaagcggctaatgctggtggcgtcgctacaagcggcctggaaatggcacaaaacgctgcgcgcctgggctggaaagccgagaaagttgacgcacgtttgcatcacatcatgctggatatccaccatgcctgtgttgagcatggtggtgaaggtgagcaaaccaactacgtgcagggcgcgaacattgccggttttgtgaaggttgccgatgcgatgctggcgcagggtgtgatttaagttgtaaatgcctgatggcgctacgcttatcaggcctacaaatgggcacaattcattgcagttacgctctaatgtaggccgggcaagcgcagcgcccccggcaaaatttcaggcgtttaactgtatttaacggaacttgctccccacggaacatttcttatgggccaacggcatttcttactgtagtgctcccaaaactgcttgtcgtaacgataacacgcttcaagttcagcatccgttaactttctgcgatagcagcagatatgccagtaaagaaatcccatttgactatttttttgataatcttcttcgctttcgaacaactcgtgcgcctttcgagaagcaagcattatataatgccaggccagttcttcttcaattgtcccgttttgaaaagctgtgctacttatgctgatcatccaacttaattccgccgcccatattagcttcgcgctggatttaccggagctatgattagcgcaatcagagatatagtcactgggaaaaacagcaaatttattcaacaaggcgataacctgctctggggcttcctccatgtttgctttaaaggtattggctccatggtcgccagaaagaaaatgctccattaaggcacaataactttcgctatcttcgataccccattgatcctctaaagactcgcgtcttttacttatgatatcgatgctgtcaaaaggaagcacatgatattggaaggtatctttgccaggttcaggctttcgcggccagaactccagcgtttcagaccattgcttatgatagaatcgataaggtgcgatcaattgtagcgcctgtaacttctcgatactgagcggctcaatacctttagcctgataataatgcagttgttctttttttgctttaaaaccggcccgaacaataagccccatcataattaatagataaagaaaagagcatcccgcggtaatcaggcctctttcattcaaaccgttggatgttatcgctgcgaacacaaacattacagcgacaacacatgttaaataaaacccccacttacaaagcagcatggccttattttctttaatcatccgttcaaaattactattaaatatttcccagccattaaaagaatacttctcgctcccaggatggttttgtaataaaacttttttcatcacattccctgttattacatactttagaggcgataattttatccatgcaaaaaaaatatccaacgaattttcttgatccgctggatatttcagaatatgactcgaatagcacgaaagattcactcgcttacgctatcgccccgcttccgacttcatctgctggcggactttttttcgcactacgtttacgcggtgcagcctttttcttatcagcactgccaccactgcccggagccacaatgccgcgaaactgccgcaccggcgtacgtttggcttgatcaataagctgatatagcgtccccaccagcggctgcataaagtcctgatagcgacactgcttttcgctgatttgcgtcagcacgctttcccagtgcgcggtcatgtccggtcgcgtcgccatctccggcaggctatggaatagcgcttttccggcgtcggtggagtggatatagcgcccttttttggtcaggaaaccacgcttgaacaacagttcaataatcccggcacgcgttgcctctgtccccagaccatcggtcgcacggaggatctttttcagatctttatcctgcacaaagcgcgcgatcccggtcatcgcgctaagcagtgttgcatcggtaaaatggcgcggcggctgggtttgccgctctaccacttcacctttttcacacagcaactcatcgcctttcgccaccacaggcagtggcgtgccgtcgttttcttcatcgcgctctttgctgcctaacagcgtgcgccagcctgcttcagcaagaaaacgcgctttagcgacaaatttgcctttggcaatgtccagttcgataacacacttgcggaacaccgcatccgggcagaattgcatcagatactgacgggcaatcaggttatagaccttcgcttcgttctccgtcaggttgatcgcagaactccgtgcggtcggaatgatggcgtggtgcgcatcgacctttttgtcatcccaacagcggttgcgtatatctggatctaccactggctgcggcaacagatccggtgcatgaacactgatggcattcatcaccgcgtggcgtccggcaaaatgttcttctggcaaatagcgacaatcagaacgcggataagtgattagcttgtgcgtttcgtacagtttctggcagatatcaagcacgttctgcgcactcagaccaaaacgttttgccgcttcaatctgcaacgcactaaggctaaaaggcagcggcgcggattcactttcccgtttatcgttatagctggtgacaatagccggttgaccactaatgcggttaaccacatgctccgccagtggacgatgtaacaagcgcccttcttcatcctggtacggttcacacgcttcgctcggttgccagatagcggtaaaccgctcatcggcaggtgtcacgatatgtgctttgacttcaaagaagtctttcgccacgaagttttcaatctcttcatcgcggcgcaccaccagcccaagcacgggcgtctgcacgcgtcccacggaaagtacgccctgataaccggcattgcgaccgagaatggtatacgcacgggtcatattgatgccgtacagccagtcggcacgcgctcgcgccagcgcagaaacgcacagcggtacaaactcactgttggaacgaagacggtcgatcgcccgctcaaccgcctgcgggttcaggtcgtttatcaagcaacgctgtacctgctggcgcttttccggtgccagttgcagatagtccagcacttcatccaccagcaattgcccttcacgatccgggtccccggcgtgaacgatttcgctggcttcatgcaggaaccgtttgatgacgttaagttgtttggtcacggagggtcggggctgtaattgccacttttccgggacaatcggcaaatccgcaagattccagcgcgcatagcggctgtcgtaggcgtctggctgcgcctgctcaagcaggtgaccgatacaccaggtcaccacctgaccattaccgcactcgataaagccatcgcctttccggtgcggtttgggcaggacatcagcaatggcgcgcgccagactcggtttttcggcaataaacaaccgcattgaattaacgaatctcaaccatggcacgaccgccgcgcgctggcaccagttcgccaattgccgtcagttcaatgccaaactcggcggctgtagctttgacctcattttctgcttccggcatgaccgccagcagcaaaccgccagaagtttgcggatcacacagcagatcgcgcacttcacgcggcatttcacccatcagatgaccgtagctggcaaagttacgttcagtgccgccaggtactgcgcccaacttaatgtactcttcaacaccggggagtttcgggatcgcttcatagtcgacgcgtgcctgcacaccagccccctgacacatttcgctcaagtggcccagcagaccaaagcccgtaacgtcggtcatcgcttttacgccttcgatgttggcaaaggacgcgcctgcgatgttcatccggcacatcacttccgtcgccagtccctgatgttctggtttcaacagactttttttctcagccgtggtaagaacgccgatccccagcggtttcgtcaggaacagtttgcatccggcttgtgcggtactgtttttcttcacccgctcggtcggtacgatccccgttaccgccagaccaaaaatcggctccggcgcatcgatggagtgaccgccagccagcgcaatacccgcctgacgacatgcatagcgtccaccttcggtcacttcgcgggcaatttctggggaaagtttgttaatcggccagccgaggatcgcaatcgccataatcggtttgccccccatcgcgaagatatcgctgatggcgttagtcgccgcaatgcggccaaaatcgaaaggattatcaacgatcggcataaagaagtcggtggtactgataacgctggtgccattgcccagatcgtacaccgccgcatcgtcgcgggtttcattacccacaagcaaattcggatcaacaaacttcgcctgctcactatgcaggatggtttccaacacttttggggaaattttacagccgcaaccagctccgtggctgtattgggtcaaacgaatgctgttctcgctcatggacatctcctgtcaatgcaatccgggtatggtaaccctcattccgtgaagtgataagtgagagtgtctgaattcctgcgcctttgctcacaatccagacagtttcgcgacaattatcagaaataagttacaaacggcgtcgggtccgggacgttaatgctcgtagatgctttcagctgcggcgtaccgaggtagagaaaaccgacaattttatcctgctcacggcaaccgaatgcttcacgcactaccggactttcagttaatgcgccactgcgccagatgccgccaaacccctgggcaactgctgccatttgcatcgccatgaccgcgcatccggcagacatttcctgttcccagcgcgggactttatgattctcttcgcatttcgccaccaccgtgatgatgagcggtgcgcggaacggcgcattacgggctttgtcgatagctttgtcatcactaccggcagcaatcgccccctgttccagtacggcgctgaaacgctcgcgcccttccccttcaatcacaaaaaaatgccacggttgcatggacttatggtccggcgcacgcatacccgcacgcaggatgttttgcagttgttcacccgttggcgcgggttcagccaagcgggaggcgctacggcgattgatcaatagttcgagtgcatccatttgattaactcctgtcgtgatatttattcacaaaattaacacgagagtggattttgttacagcacagtccgcaattcctgctgacaagtaccggttgggtcattacgataaccacatctattgcgcctgtgacaggtgtgaccttaagttgggagaatacatgcgaaccctttggcgatttattgccggattttttaaatggacgtggcgtctgctgaatttcgtccgtgaaatggtacttaacctgttctttattttcctcgtactggttggtgtggggatttggatgcaggtcagtggtggtgatagcaaagaaacggccagtcgtggcgcactgctgctggacatttctggtgtgatcgtcgataaacccgacagttctcagcggtttagtaaattaagccgccagctgcttggtgccagttccgatcgtctgcaggaaaacagtctgtttgatatcgtcaacactattcgccaggcgaaggacgaccgcaatatcaccggtattgtgatggatctgaaaaacttcgcaggcggcgaccaaccgtctatgcagtacatcggcaaagctctgaaagagtttcgtgacagcgggaaaccggtttatgccgttggcgagaactacagccaggggcaatattatctcgccagtttcgccaataaaatttggctgtctccgcaaggcgtggttgatctgcacggctttgccaccaacggtctgtactacaaaagcttgctggataagctgaaagtttccacccatgtgttccgcgtgggtacgtataaatctgccgttgaaccgtttattcgtgatgatatgagtccggcagcccgcgaagctgacagccgctggattggtgagctgtggcaaaactatctgaatactgttgccgctaaccggcagatccctgctgagcaggtattccctggcgcgcaagggttgcttgagggtttaaccaaaaccggtggcgataccgcgaaatatgcactggaaaacaagctggtcgatgcactggcaagcagtgcggaaatcgaaaaagcactgaccaaagaattcggctggagtaagactgataaaaattatcgcgccatcagttattacgattacgcattgaaaacgccggcagataccggtgacagcatcggtgtcgtctttgctaatggcgcaattatggatggcgaggaaactcaggggaatgttggcggtgataccactgcggcacaaatccgcgacgctcgccttgacccgaaagtgaaagcgattgtcctgcgtgttaatagcccaggcggcagcgttaccgcgtctgaagtgattcgcgctgaactggcagcagcccgggcagcgggtaagcctgtggttgtaagcatgggcggcatggcggcatctggtggttactggatttccacgccagctaattacattgtggctaaccccagcaccctgaccggttctatcggtatcttcggcgtgatcaccaccgtagaaaatagtctggatagcattggtgttcatactgatggtgtcagtactagtccgctggcggatgtttctatcaccagggcactgccgccggaagcgcagctgatgatgcagttaagcattgagaatggctataaacgctttatcacgctggttgctgatgcgcgtcatagcacgccggagcagattgataaaattgcccagggccacgtctggaccggtcaggatgcaaaagctaacgggctggtcgatagtctcggggatttcgatgatgcggtcgccaaagcagcagagctggcaaaagtgaaacagtggcatctggaatattacgttgatgaaccgaccttcttcgacaaagtgatggacaacatgtctggttctgtccgggcaatgttgccagatgcgttccaggccatgttacctgcaccgctggccagcgtagcctctaccgttaaaagtgaaagtgacaagctggccgcgtttaatgacccacaaaaccgttatgcgttttgcctgacctgcgccaacatgcgttaagtcttgtactgagtggccgacagatcgtcggccacattattttttacgtcgacgaatcctcttcccgctgtttcgccccatatttccttatccgcatagtatcaggtgcgctccccctgcctcacgtatatacttttgctctttcgatatcattcatatcaatatcatgcaaaagaaaagtatttacgttgcctacacgggcgggaccatcgggatgcagcgttccgagcagggttatataccggtgagtggtcatctacaacgccaactggcgctgatgccggaattccatcgcccggagatgccagatttcaccattcatgaatatacgccgctgatggattctagtgatatgacgccggaagactggcagcatattgctgaagatattaaagcgcactatgacgactatgatggttttgtcattctgcacggcaccgacacgatggcgtataccgcctctgcgctgagcttcatgctcgagaatctcggtaaaccggtcattgtgacagggagtcaaatcccgctggctgagttacgctctgacggacaaattaatctgctgaatgcgttgtacgttgcggcgaattatccgatcaacgaagtaacgctctttttcaataaccgattgtatcgcggcaaccgcactaccaaagcccatgccgatggttttgatgcgtttgcctctccaaaccttcctccgttactggaagcaggtatccatattcgtcgtttgaatacgccacccgccccgcacggtgaaggggaattaatcgttcatccaatcaccccacaaccaattggcgtagtgacgatttatccagggatttctgctgacgtcgtgcgcaattttctgcgccaaccggtgaaagcattgattctgcgctcctatggcgtgggtaatgcgccacaaaacaaagccttcctgcaggaattacaagaagccagcgatcgcggtattgtggtggtcaacctgacacaatgtatgtccggtaaagtgaacatgggtggttatgccaccggtaacgccctcgcccatgccggcgtaattggcggtgcagatatgactgtagaagccacgctaaccaaactgcattacctgcttagccaggaactggatactgaaaccattcgcaaggccatgagccaaaacctgcgcggcgaactgacgccggatgattaaggagactgtaatgccccctcgcgccctgttactggtcgatttacaaaatgatttctgtgctggtggcgcgctcgccgtgccggaaggtgacagtacggtggatgtcgctaaccgcctgattgactggtgccagagccgcggtgaagcggttatcgccagtcaggactggcacccggcgaatcacggcagttttgccagtcagcacggtgtagagccttatacgccaggccaactcgacggtttgccacaaaccttctggccagatcactgtgtgcagaacagtgaaggcgcacaattacatccgttactgcaccaaaaagcgatcgcagcggtgttccataaaggcgaaaatcctttagttgacagttacagtgccttttttgataacggccgtcggcagaaaacctctctcgatgactggttacgcgatcatgaaatcgatgaattgatcgttatgggcctggctactgactattgcgtgaagtttaccgtgctggacgcgttacagttaggttataaggtaaacgtgattaccgatggttgtcgtggcgtgaatatccagccccaggacagtgcgcacgcgtttatggagatgagtgcagctggggcaacgctatatacgctggcagactgggaagagacacaggggtaattttacgctggcctacaattctgtactggcattgtaggccaaataaaacacgtcagtggcacatctggcaattgatgccatcaacgaaagatttaattcacctcagaaatctcttccaagctcaccttccgcgtttcgatgccaaaaatggagagaaccagcgcacagagcaataacataacaccaagtaccataaacaccgtgatgctcccataatgtgttaataatgccgcaacgccatagggcgtgaagactgcgacgatccgtccgacggcattaacgaaaccgctaccgcgcaggcgtaaatgcgttggccaaagctccgggatataaaccgcgctcgcgaagcaaacatacatgtataaaaagaagatcatcaccagtccatagattaaaatcgcccactctgtagtctgaatactatagatatagcctaacacggcaataataataagtaaggtggagccaaataaccgacgaggaaaatgatcaataattaatgccgcaataaatattcctaccggagcgccaatcataataacagcggtcattaatatacttttatcgacatcaatgccggagttaacaaatatggtcggtatccatacggtgatggtataaaggctaatgttcattgcaattaaaacagtaatcgcgactaatgtacgtcgtaacatttcacctttaaacaggagccagaaagtacccttgattactttaaccttgctgttgctctgatagctagtaagcgggggtaaacgaatactcttctctctttcaatttgctgctctacttcacgaagttggcattctgcacctgcgatttgccctttccctgccagccatcgtgggctctcgataaagtatttaccactgagaaaccaggctaacagtatgccaataccacccagcagaaacattattcgccaactaaaaaaagcgataaccaccacgcctatcgccgcagacagcatggggctccagttaccaacaaaactgagccgcgcggaccattttccacgcaccgtcgcggggataaactccgtaaaactggcatagccaaccataatcagcgcccccattcctgttcccatcaggaagcgaaagaagatgagccagtacatatcagggacaaaagcggcccctgttgcagcaataccgacgatgagaagatttatgcgaaacgccctgcgccgcccaaagtagtcaccaataaacccaccagtaagactgccgatgaaataaccaaacattaatgcgctggtaaaggcggcattgaggaaattattactccatccattgcttaccagctttgctaagacgacattaccggagtaactcaaaaaccctgttaataacagactaaagcttataataccaaatatacgataatgaaaccgggccaaaggcaagcggtccagtcttgcgccaatttgatcatattgttccattaggtgcctcggatttgctaaaaaggtagcaattgcggcaaattcacttgccgcatctttatcatcattttatttcaaggcgcaggaacaaataatattgacaacgtgtgcttaaattaccacaccagctggatattattgtctttgcaaaatgctatccactctgcacccggacttttatcagttattatgtaattaatatgactaaaatcagctaactggacaaaagctttgcgatcaaacttagagtgatcaaccaataacgcaacttctgtcgcctgacggatcattgtctttttgatttcagcttccgcttcattagagtccagcgcgccgctgttaatatcaagacctttacaactcattaccatgatatcgacatgatagcgcctgatgatctctttagtaattcttccttgcagactaagtgtatttttgtttagttccccacccgtactaacgactttaatttcactctgagccagaacatgaatcgcttccgcgctgttggttagcaacgtcaggccactacggtcctgtaacaatttgagcaattccattacggtactactggaatcggctgccatggtggttttattgtcgataaagggtagtgccttgcgtgcaataagctgcttctcttcataaaagctactagcgcgcttataaaaatggatattctccgtcaacatcgctgtatttaaaacagcaccaccataggttctggtcaaaaagccttcatcttccagcttctcaagatcgcggcgaatggtttcttcggttacctgaaaaatcccactcaaattactgactgtcacctttttatcgttggcaaccatttgcttaattgcctgaatcctgtcttttgccgccacgattacacccctgtatctttttacatcacattagcgcgattatcgcataaccgatgtttactttcaaaataacctgtttgaatcacagattttcatcacagttttcacagaaacagaggtgaatcgtgttgagtatttaacgctccagggcctctgccatttccctcatcaatgttgcgtctgcatcgcttaagttgatattcagtgccgcgacattttcgcgtacctgttccggtgcagtagccccactaagaatggagattaaatcactctgttttaatatccacgccagtgccagagtgggaattgtgcactgataacgagcacaaagtggctgccactgttcaagcatatcaatcactttcagcatgttttcacgctggaaccagactttatttgcccgagcgccgcccggaacgtaatcacgagtgatggtgccggtcaacaatccctgctctagcggggaataaacctgaaccacaatgccattatcacgacatagtggcagcagttcgttttccattgcccggtcgaggatactgtatttcgcctgaataatatccagttcaccatattgcagatactcgcggatatggtcagcatcgacgttagcagcgcctatagcgcgaattttcccttcagactttaactcattaagcactgcgacagtttcagcgatcggcgtaaaaaatggcggcacgctctgccagtgcgtcatgtagatatcgatgtaatcaatacccagacgttgcaagctcgctgctacctcttcgcggatagattccggggaaaggtttttatacaactgccgatcgccaactttgttgaataaacttccttttcgttcccagacaatgccgcatttggtttctactacaacctgttcacggggcagtttttttaacgcctgaccgacgataacttcactattgccaaagttatatcctggcgcagtatcaatcagattaatgccacaacgatgggcttcaagaatcgtatcaatacatatttgccgatcgagatcgccattccatgcaggaccgccgccaatggcccatgtccccaaccccattcggctaagcgtaatatccgttgtgcctaaaggtatctttttcatttgccttcattatccttcgtattcttccagcaattgttcgaccagctttctgttttttacgccggtggtggcaccgacgcttagaacgctgatagccgccgttgcattggcaaagcgtgcgcattcacgcagatttttgccttctaacagtgccgcaataaaaccactagcaaagttatcgcccgcgccaatggtgtcgatggcggttattcctgcgaccgccggcaccttcatcgtcatgtcaccacgcttgataaagcagccgtctttacccgttttaatcaccaccgtttttacgccgcacgcaagaaagcagtcagcaatttcatccagtgtctctttcccggtgagtaattttgcctcggcaaaattaggaaacagataatcgacataactcaatgcttcgcaaatatcatccagcgtttcattcaaccgcggtttgatcatatcggcacagataatcatctgccgggctttagcttgcgtaaaaatttctgttagcgctttaccatccaatagtggactgttgaaaatactggccagacttaataatttcgcctgagaaaaccgcgcaaaatcaacatcgtcaatattcaatttccacagactgccattacggtttgtgacaaacgtccgctcgccatcctccgtcaccagtccaacgttaatagaggtatctatgctgacgtcctgcttcaggctttgaatatcaatattctctttgcggcaatggtcgagaataaattgccctgcggcatctttaccaatacgactcattaatgctgtgcgatggcccagacgagaaataattgttgcttcatttattgcatcacccccggtggtcattgcgattctttcaagaggataagaatccacatcaaagatatttttactgaccggttgcaatggaatatcaacaatagcggcacctatacaaataacgtcgagattatccatatcattattccgctttgccatcagaaccgaacagtttaattttttccaatgcccgttcttttacagctttacgtacttcacgttctaaatgcaggaaaggctgatcctggttttctttcactgcaaccattgcggcctgacagagctccgtatgaatgttgattttcgcgatacccaagctaattgcagttttaatgtcggcatcactgatcccgcttgcaccgtgcaaaaccagcggaacagaaacggcatcgcgtacgcgtttgacgacctcaaagttcaattgtggctcactcgtataaaccccatgctggttgccgatggcgacagccaaactatcacagcccgtacgttcaacaaattcagccgcctggtcaggatcggtatagtgatagcccgccagcgcttcctcataaacggtttcattaccgacatgccctaattccgcctctaccggaatacccagcggatggaagaaatcgacagcctctttggttaaacgaatattttcttcgaaatcaaacgcggaagcatcacgcattaaactattcataccatgagtccaggcgttatgaataatctccatactccgaccatgatcccaatgagttattaccggcaccgttgctttttgtgccatacttaccatcatgtgagagaaatcttcaaaactggtgttaccgacaaaacctgtaccaaaagaaataataaccggggatttcgcttcttcggctgcgtcgataacgcccatcaacatttctgcattccatacgttaaaatgggcaattgcataatgtttatttgtggcatcgttttcccaatatctgatatctgcgagcatgttctgttctcccgtattaattaatcgctaattttaataacgcctttaataatgtcgcgtttgttgttaacactctcttcaaatgcctgttgtacatcccgataatcgtaaatatgcgtcaccatgcttttcacatcgaatcgcccactagaaatagcttcaatcgtgaccggataacgattggcatagcggaataccgtctggatagtgacttcgcgattgattttgaggaaattgattgcgctatcgccgggtacagtaccaacaatcataattttaccgccgcgcattaccagataaggtgcctgtttaacggtgaccgcagaacccgctgtttcgaaaacaatatctgcgcccatgtcttcggtaaattgctgacagcgtgcaatagtgtcttcttttgcgccgttaataaccactgtcgcaccaagctgttccgccattgccagacgtttttccagcacatcaacgacggcaatttccgttgctcccaggcatttgcacgcttgcaacgtcatcaaaccaatacaacctgctcccagaataattatcttcttacccggtttaacatctgccagcatcgcggcatgcatcccgactgcggcaggctccaccagcgccccttccatcgtgtccatattgtcgggcagtttgtaagtaaagctctccggatgacacagatagtgcgttaatgcgccgcggtagttgggttgtgtcgccataaaatcaacgtccgggcagatgttatatttgccttccagacagtaacgacagtgaccgcaaggaacgccaggttcgatatttacccgatcccccggtttaaatttgcgcacgcggcttcccacagccacaaccgtcccggcgcattcatgacccaggccaatttcttgatttgggtctttaggcggaataaacgggccactttcaaaaccatgtacatcactaccacaaataccgacatattctactttaatcaaaacttcatcttctttaggcactggtatttctgcactaataattttcattgtgcccggcacctgcaatattgctttactatttttcattttgaatccacccgtattatttattggctactgcatcaatacttaaactttcaacggagacacctttggtttcgattccaatggtggcgatagcaattgcgacaataatactaaccgcccccagaagaataaagactcccgtaacgccataactactgagcagcactgcaacggcataaggtgcggcaataccactgattcgccctaccgcattcgccagaccggagccacggagtttggcctctgtcggccagatttcagggacatacactgcgctggcatagcaagcgtacatatagacgaaagtaatcaggaagaaaccaatcaacgttatgagcaacatactggtttgcagactatagatatatccgagcaccgcaatcaggattaatagccccacacccattgttttacgcggaattttatccatcaccagcatggcaataaaaataccaaatggcgcgccaaacatactcatggtatttaaaacaatgctgtcttttaaattaatcccctgggtcatgaatattgttggcaaccagttaattagtgtgtactgcacaacgttcatggcaatcagcacacaagagcctaatatcacgcgtttcagtaatactcctgtcagtaaggcactatacggcaccgcttgtggcgctttaccgtcatcagcaataaccacaggcggcaaaggtttacccgtctggcgtatgacgccttcttctatactccgcatgactttctcggcttcctgataccgtccgcggctttccagccagcgcggggattcaggaaagtagcgccaggccagcgccgtagcgataaggctcaatattgcagggataagcagttgtacccgccagttccactctgcactaatcagcggcgtgagtcccatcgctatcaaactacagagcggataactccagttgccaataaaggaaacccgactactccacgttccacgatttctaccgggcatatattcggtgaaaccagcaaacagcgtaaccagtaaagctcccagcccaactcccatcacaaaacggcaggcaataaggaaatccatattcggactgaaagcaccgacaaccatgctggcaatatgaatggcctcatagaggatgaacgcatttctgcgaccggttttgtcgccaatgatgccgcccaccagcgcaccgagaaacattccggcggtcgtgattgcactgaatgtggctgtggtggaattatctgtccagcccaacgctttcagctgcgcgaggatcaagccaccaacggcattactccagcagacaagcaagccaaacgcgacgatggcaaacatactactatgccagcggcaatccggtaagcgatccagccgtgcaccacaatgcggttttgttatctgttccatgcgataacgttccttcaggagagtggttattcatcaaagtcgtaagtcatgatcactttgattgcggttttatcgaccatcgcatcaaacccttcgcgccattggctcaggccgatacgatgcgtgatcatcggtttgactttgatagcgccgctggctaatagcctgatagcgttacgccaactggtggagtcataggccatatgcccaatgatgcttttgttccaggcggtaatgtcattaatgctgaaatcaagaggtttgaagcccattccaacgcgtaccacttccccgttcgggcggagcatttcgatggcttgtttcagtgcgatattggcaccggagcattcaatcaccagtcccagattgtctttgccacaaatttgctggcagcgcgccaccacatcttcggtagaaccatttactactgccgtcgcacccagttcttttgcaaccgggaagcggaccgccacatcttcttgcagaccaacgacgacgatatttaccgcccccataattcgcgccatttgtacggagaacagcccgagtgggccagtgccgatgacgaccacatcctgaccaggaaggaatttgctttgctgcgcgatggatttgtaggcattacagatagggtcaagtacggctgcgtcctcataatcaacaccatcagggatttcccacaacgcatgacgatgaattttgagaatttcaccaggaaccagacaatatttggaaaaaccaccgccccaggtattattatccagaccaaggtttactttttctgtacaacacagaaaatcaccttgttcacaggccggacaaacaccgcaaacgtgaccgctgttatcgcttacgacgcgttgccccactttccagtctttgactttttcaccaacctgcgcaatacaacctgcgaactcatggccgcggatagagttaaactcatcagaaccgctatcgacattgtagtgcttcatgtctgcgccgcagattgccgcggctttaatttcaatcactacatcttccgggccacacatgggttgtgggacatcaatcatcttgtagccgccaaaggccttgccaaaccgagccagtgctttcattgcgtcatcctctgtgtttagttttgcttagatggccatcatacttacccacatgatttttgaggtcaacattaaatctgtaaaacacagataatgatctgcgttttacaactcagatcacaattacgcagaaaatggctgggtctgttacaggttgatggaaggcggggcgcaaaaagagcaaattcgagagggattaccggccaaataggtctgagacttaagttcaggagaagtcattcaggtgtgaacgggacggcaagagatcggactgggacttagccaggtcatggcgagataattgagatgagtcgtggggtcattgttggctatccccttcatagccgaggcaaaaaggggatgaaccacttacttaaacatggcaataggctttgcactgataccaaaatcttcttttaactgctgtttgctcttcatgaccatctgaccatttgtgtcaattgtcatatgctgtgcttcgatattatggcgggcttgccacagcatcaccagttgcaggcagttctctttttgttcctcggtcaacgcaacgccatcaggccatttccccagttcaacggcggtgctcaaacgctggtatacctcaggcatcatgctgttgataatgtcatcaagattcataatttttccgctcctgtggaataagttgctgaatcgttttttcaaccgttgatttcttcgccgttttcgccatcggtaaagcgtaaagaggcagagttaacacaataacgttcgcccgttggctgcggcccgtcggggaagacatgccccagatgggcatcacagttaccgcaacgaatttctatgcgctgcattccatgactcaagtctttgatataacgaatggattcttcacttaccggttcgtagaaactgggccagccacagccggaatcatacttggtttgggaatgaaacagcggggcatcgcagatcaaacagtgatatacgccgtcacgcttgttatgcagtaaacgacccgtaaatggcggctctgtcccatgattctgcgtcacgtaaaactgcatctcggacaaattttttttcagttcttctgcgctaggtttattagccatttgctcacatctcactttaatcgtgctcacattacgtgactgattctaacaaaacattaacaccaactggcaaaattttgtcctaaacttgatctcgacgaaatggctgcacctaaatcgtgatgaaaatcacatttttatcgtaattgccctttaaaattcggggcgccgaccccatgtggtctcaagcccaaaggaagagtgaggcgagtcagtcgcgtaatgcttaggcacaggattgatttgtcgcaatgattgacacgattccgcttgacgctgcgtaaggtttttgtaattttacaggcaaccttttattcactaacaaatagctggtggaatatatgactatcaaagtaggtatcaacggttttggccgtatcggtcgcattgttttccgtgctgctcagaaacgttctgacatcgagatcgttgcaatcaacgacctgttagacgctgattacatggcatacatgctgaaatatgactccactcacggccgtttcgacggtaccgttgaagtgaaagacggtcatctgatcgttaacggtaaaaaaatccgtgttaccgctgaacgtgatccggctaacctgaaatgggacgaagttggtgttgacgttgtcgctgaagcaactggtctgttcctgactgacgaaactgctcgtaaacacatcaccgctggtgcgaagaaagtggttatgactggtccgtctaaagacaacactccgatgttcgttaaaggcgctaacttcgacaaatatgctggccaggacatcgtttccaacgcttcctgcaccaccaactgcctggctccgctggctaaagttatcaacgataacttcggcatcatcgaaggtctgatgaccaccgttcacgctactaccgctactcagaaaaccgttgatggcccgtctcacaaagactggcgcggcggccgcggcgcttcccagaacatcatcccgtcctctaccggtgctgctaaagctgtaggtaaagtactgccagaactgaatggcaaactgactggtatggcgttccgcgttccgaccccgaacgtatctgtagttgacctgaccgttcgtctggaaaaagctgcaacttacgagcagatcaaagctgccgttaaagctgctgctgaaggcgaaatgaaaggcgttctgggctacaccgaagatgacgtagtatctaccgatttcaacggcgaagtttgcacttccgtgttcgatgctaaagctggtatcgctctgaacgacaacttcgtgaaactggtatcctggtacgacaacgaaaccggttactccaacaaagttctggacctgatcgctcacatctccaaataagttgagatgacactgtgatctaaaaagagcgacttcggtcgctcttttttttacctgataaaatgaagttaaaggactgcgtcatgattaagaaaatttttgcccttccggtcatcgaacaaatctcccctgtcctctcccgtcgtaaactggatgaactggacctcattgtggtcgatcatccccaggtaaaagcctcttttgcattacagggcgcacaccttctcagctggaaacctgcgggtgaagaagaagttctgtggttgagcaacaacacaccgttcaaaaatggcgtcgctattcgcggtggcgtaccggtttgctggccgtggtttggtccggcggcacaacaaggtctgcctgcgcacggttttgcccgcaacctgccgtggacgctgaaaagtcatcatgaagatgctgatggcgtagcgctgacttttgaattgacgcaaagcgaagagacgaaaaaattctggccgcacgactttacgctgttagcgcatttccgcgtgggtaaaacttgtgaaatcgatcttgaaagtcatggcgaatttgaaaccacctctgccctgcatacctactttaacgtgggtgatatcgctaaggtaagcgtcagtgggctgggcgatcgcttcattgataaagtgaatgacgcgaaagaaaatgtactgaccgatggtattcagaccttccctgaccgtaccgatcgcgtgtatctgaatccacaagattgcagcgtgattaatgatgaagcgctgaatcgtattatcgccgtaggccaccagcatcatctgaacgttgtcggctggaacccgggaccggcgcttagtattagcatgggcgatatgccggatgatggctacaaaacatttgtttgtgtagaaacggcttacgctagtgaaacgcaaaaagtgaccaaagagaaacctgcacatctggcgcaatccattcgcgttgcgaaacgttaatttacgttaatgttgtgtgccgggtgcaatgcatccggcacacaacatcacaccatatccagcgcagtttttccttttggtgccggatatgccttatccagcatagctaattccgcactagaaagttcgacctcaagcacagccgcattttgttggacatgggcaatcgtggccgcttttggaatcgccatcacaccctgatgactgatcacccacgccaacaatacttgtgccgcgctgatattgtgagcatgtgcaatttcgttgactaccgcgttttttaacagtccattgcgcaaccgcccggcctgggctaacggactgtaagccatcaccggcatctgctgttgctggcaccaggggagtagatcgtactcaattcctcgactaccgagatggtaaagcacctgattagtggcacactgatttccccccggcagctgccagagttcctgcatatcagcataatcaaggttagaaacgccccagcggcggatttttccctgggcgatcaatttttccatcgctgcgacagtctcttcaaaagcgaaactgccagaccagtgtaataagtaaagatcgagataatcagtattgagacggcgtaaactggcttcgcatgcatttatcgctttttgcccgccagcattccacggatagactttagagacgagaaagaccttctctcgcagaccggttaatgcttccccaaccaccttttcggcaccgccatcggcatacatttcggcggtatcaatgagggttaaaccgagttcaatgcccgcgcgtagtgcagcaacttctgttttgcgctgactggcatcttcgcccatataccatgttccctgccctacggctggcagactgacatcgccactaaattgaatcattttttgttgcattgtttcctcccaggtattgcaccaccgtaatgcaaaacagggcgtgacgccctgtttttatgcacaaaatgccctggaaagatgcattatcagaatttgtaggtgatcccggtagaaatcaggccagtccaggatttatccaccatcgggctgtcagtaacttcatcagacagacgggtgtagcgtgcggtaccgtaaacactccagtcgccgaggaagttgtagctggcgctcagctccaggtaagggctccagctgtcgttcgggttatagccacgcagaccgctgcgagcggactctttgcggcttacgccataatagtattcgttctggttttcgctgttccactgcacaccaatacccggagtcacggtcaggccaccgttggtgtaacgatacaaccaggccatatcccagacgatgccgttgctgttatccagggtatcgccagccagggtggtacgcaggtaaccgtactgggtaaagtgagcataagacagaccagccatcatggtgctcttacggtcatccaggtgacgcatttggtgatcgccactgtctttcgctttgaagtaaagcgggctccagtaagcggtaatactaagtttatccgttgcgtcattccacaggtagtaaccaccacctaagccacggaaccagaagttatcgccttcatagttgattaccggtactgggtaaacatcggtatcgtaatctttatatgggtgttcaacgacacctacgcctgcgcccagggaaaatttaccttcagcgtgcgctacgcctgcagacgttgcgataagcactccaagtgccagaagtttgagtttggtcacaattaatcattccttaaacaaatgtttagcgggcgacaaagtttacccgtcaatacatcgaaacccaacctttttacgttttcattttttaaagtaactgtttaattttcctgacgcggatgacaccgcgcttacagccaaatgaatttagcgttactggcgagcctggtctttacattaattatgcaaaatttatggatgagttgttgatatgccattgaaattaagaaagccgtgcaggcaagttttccatttgccatctacgcttaattttgaaggtgtatcaccgggcacgttgttctcatcgtcgataaaatggcatgagagttgctgtgttttagcaagagacgtcgttcagtttacctcttccgggagcctctactattcatatgaacggctcttaacctgtgctaaaaaacgaaaggacggcataccatgaatatattcgatcactatcgccagcgatatgaagctgccaaggacgaagagttcacactgcaggagtttcttaccacttgtcggcaagatcgcagtgcttatgccaacgcggctgagcggctattgatggctatcggtgagcctgtcatggtcgatacagcccaggaacccagactttctcgactcttttctaaccgggtcattgcacgttatccggcgtttgaagagttttacggcatggaagacgcgattgaacagattgtctcttatctgaaacacgcggctcaggggctggaagagaagaaacaaatcctgtatctgctggggcctgtgggtgggggtaaaagtagccttgctgagcgactgaaaagtttaatgcagctcgtaccgatttatgtattgagcgcgaacggtgagcgtagcccggtcaacgatcatccgttctgtcttttcaatccgcaggaagatgcgcagattctggaaaaagagtatggcattcctcgccgttatctcggcaccatcatgagcccgtgggcggcaaaacgcctgcatgaatttggtggcgatatcactaagttccgggtagtgaaggtctggccgagtattctgcaacaaattgctatcgccaaaacggaacccggcgatgagaacaaccaggacatctccgcgctggttgggaaagtcgatattcgtaaactcgaacactacgcgcagaatgacccggacgcctacggctattccggtgcgctgtgccgcgccaatcaggggatcatggaattcgttgagatgtttaaagcaccgattaaagtgctgcatcccttgttaaccgccactcaggaaggtaactacaacgggacggaaggtatctccgccctgccgttcaacgggattattctcgcacacagcaacgagtccgaatgggtcactttccgtaataacaaaaacaacgaagccttcctcgatcgtgtttacatcgtgaaggtgccgtattgcttgcgcatttccgaagagatcaaaatctacgagaaattgcttaatcacagtgaattgactcacgccccatgcgcccctggcacgctcgaaacactgagtcgtttttccattcttagccgcctgaaagagccagaaaactccagcatttatagtaagatgcgggtttatgatggcgaaagtctgaaagacaccgatcccaaagccaagagctatcaggaatatcgtgactacgccggtgtcgatgaagggatgaacggtctgagcacgcgttttgcgtttaagatcctctcccgcgtgttcaacttcgatcatgtagaagtggcagcaaacccggtccatctgttctacgtcctggaacagcagattgagcgcgagcagttcccacaagagcaggcagaacgctatctggagttcctgaaaggttatctgatcccgaaatatgccgagtttatcggcaaagagatccagacggcctaccttgaatcctattccgaatatgggcaaaacattttcgaccgttatgttacctacgcggatttctggattcaggatcaggagtatcgcgatccggataccgggcagctgtttgaccgcgagtctcttaacgccgagctggagaaaatcgagaaaccggcggggatcagtaatccaaaagatttccgcaacgagattgttaacttcgtactgcgcgccagagcgaataacagcggacgcaatccgaactggaccagctatgaaaaactgcgcacggtcatcgagaagaaaatgttctccaataccgaggagctgttgccggttatcagctttaacgccaaaacgagtaccgacgagcagaagaaacacgacgactttgtcgaccgtatgatggaaaaaggctacacccgtaaacaggtgcgtttactgtgcgaatggtatttgcgcgtacgtaaaagctcttaacaaccctggcccggtacacatgttaccgggcctacaacgacagcgaaccgtgggcctgagaagcggcaacacaggcgtagcatacagttggcaaatgtagtacggggggcatatgacctggtttattgaccggcgtctgaacggcaaaaacaaaagcatggtgaatcgccagcgttttttacgccgttataaagcgcaaattaaacagagcatctccgaggccattaataagcgtagcgtgactgacgtcgacagcggcgaatccgtatccattcccacggaagatattagcgaaccgatgtttcatcaggggcgtggcggtctgcgccaccgcgtgcatccgggcaatgaccatttcgtccagaacgaccgaattgaacgtccccagggtggcggcggaggttccggcagtggtcagggccaggccagccaggatggtaaaggtcaggatgaatttgtctttcagattagcaaagatgagtatcttgatctgctctttgaagatttggccttaccgaatctgaaacaaaaccaacaacgccagctgaccgaatataaaacgcatcgggcgggttataccgctaacggcgttccggccaatatcagcgttgtgcgtagtttgcagaacagtctggcgcgacgcacagccatgacggcaggcaagcggcgggaacttcatgcactggaagagaatttggccatcatcagcaacagtgaacctgcgcaactgctggaagaggaacgtctgcgcaaagaaattgcagaattacgtgccaaaattgaacgcgtcccttttattgacaccttcgatttacgttacaagaactacgagaagcggcccgatccctccagccaggcagtgatgttttgcctgatggacgtttccggtagtatggatcaatccactaaagatatggctaagcgtttttatattctgctgtatctgttcctcagcagaacgtataagaacgtggaagtcgtatacatccgccatcatacccaggcgaaagaagtcgatgaacatgagtttttctacagccaggaaacaggcggcaccattgtttccagcgccctgaaactgatggatgaggtagtgaaagagcgttataacccggcacagtggaatatttacgctgcacaagcaagcgacggcgataactgggccgatgactctccgctttgccatgaaatcctggcgaaaaaattattacctgttgttcgttattacagctatatcgaaattacccgtcgtgcacatcagacattgtggcgagaatatgagcatctgcaatctactttcgacaactttgcgatgcagcacatccgcgaccaggatgatatttatccggtgttccgtgaactgtttcataaacaaaatgcaacagctaaaggctaaaactatcagccaggtcattatcgcctggctgatttttagcttactgtaaattatctcatttattacatacattagcttacaatcgctttaaatatgacagcataacctttacataatttagttccagaaaacaatcattcggaaaaatgattcagagtacacgtatttccatggggttattctttaaatattttttaagcttaacgaaaattgatcctggtcaaaactatatatctctgccaagtataaaatccagcactcacattgctctcctttttatggtttctatgggtacacaaaaattaaaagctcaaagcttttttattttcagtttattgctgacgttaattttattttgcattactaccttatataacgaaaacacaaatgtaaaactcatcccacagatgaattacctgatggttgttgtggctttgtttttccttaacgccgtcatttttcttttcatgttaatgaaatatttcactaacaaacaaattttaccaacactcattttaagccttgcatttttaagtggccttatctatttagttgaaaccattgtaattatccataaaccaattaacggcagtacactgatccagacaaagagcaatgatgtttctattttctatattttccgccaactcagttttatttgtttaaccagcctggcgctcttttgttatggaaaagacaacatccttgacaacaataagaaaaaaacgggaatcctgttgctggcgctgatcccttttttagtttttccccttctggcacacaatctgagcagttataacgctgactattctttgtatgtcgtcgattactgtccggacaaccatactgcgacctggggaatcaactatacaaaaatattggtttgtctgtgggcatttttactgttctttattatcatgcgcacacgattagccagcgaactatggccgttaatagcattattatgtctggcaagcctatgctgcaacttacttctactgactctggatgagtataattatactatctggtatatcagtcgcgggattgaagtttccagtaaactgtttgttgtgtcttttctgatttataacattttcaggagctgcaactctccagcaaactggcagttcatgatgtgctgaccaatatttataatcggcgctactttttcaacagcgtagagagtttattgagccgacctgttgttaaggacttctgtgtcatgctggttgatattaatcagttcaaacgcatcaatgcccaatggggacatcgtgtgggtgataaagtgctggttagtattgtcgatattatccagcaaagcatccgccccgatgatattttagcgcgactggagggtgaggtgtttggcttgctatttaccgaactcaatagtgcccaggcaaaaatcattgcggaacgtatgcgtaaaaatgtcgaactcctgaccggctttagtaacagatatgatgttcctgaacaaatgaccatcagtattggcacggtttttagtacgggtgacacgcgtaatatcagccttgtcatgacggaagcagataaagccttacgcgaagcgaaaagcgaggggggcaacaaagtgattattcatcatatttaagtgcaaaaatattcagagccatgctttttgcgtggcttttgcatacaatttattactattacccctaaatttcccctccccagcggcgcagagatgagtataattagcgcccctgtgccaggccgcaatcgaactttatctggttttctcgtttcactaaccgaaggagatgcgtataaagcttccgatgagcgtttatatgtcaataagcagaacaaaaacagccgttcatgataaccttctgtggttgtttgcttgtaatctcaggagcgtgaaatgactgaaatggctaaaggaagcgtgacgcatcagcggttaatcgctttattaagtcaagaaggtgctgacttccgcgtcgttacccatgaagcggtaggtaaatgtgaagcggtgagtgaaattcgtggcaccgctctaggccagggtgctaaggcactggtatgtaaagtcaaaggcaatggcgtaaatcaacatgttctggcgatcctcgcagccgatcaacaggccgatctgagccaactcgccagccatataggcggattacgcgctagcttggccagcccggcggaagtcgatgaactcacaggctgtgtcttcggcgcgatcccccctttcagcttccatccaaaactcaaactggttgccgaccctctactcttcgaacgatttgatgaaatcgccttcaatgcaggcatgctggataaatccgttattttgaaaaccgcggattatttgcgcattgcgcaaccagaactggtcaatttccgccgcactgcgtaattagccggtccgttcgataagaagaacggacaaaaccagtacaacagcaatggcaaaaaagctactcgtgataatcagtgtctcgacaaacatttgatcgttcatagcatgcccccgggagatagctgttttcacgttattgttagcgtgcacaaatggcagtttgatgacagttcgcctgattttttatgcaaaaaacgtaaagattttctacttccttcctgcagcaagcgtaaagtaagcaggcttattattttttggcaaggaaaccacgatgtttgatgtcactttgctgatcctgctcgggttagctgcgctgggctttatcagtcataacaccactgtcgccgttagtattctggtgttaatcattgtccgcgtcacaccgttaagcaccttttttccgtggattgaaaaacaggggctaagtatcgggataatcattctgacgattggcgttatggcccccatcgccagcgggacgctaccgcccagtaccttgattcacagctttctgaactggaaaagtctggtggcgattgcagtaggcgtgattgtctcctggctgggtgggcgcggcgtgacgttaatgggcagccagccgcaactggtcgccgggctgctggtaggcactgttttaggcgtagcgctgtttcgcggcgtaccggttgggccgcttattgccgcgggtctggttagcctgattgtggggaaacagtaattattgccgcgggtctggtttcgcactttgtggggaaacagtagttaatctcgcaatatatcggcctggcgtttgccccaggcctttcttaaacatagtaataaaggccgttgtactatcataccccagcgtatgagcaactttctgtacagtatcgcctttcactaatccctgaagcgccataatcagctgtaactgctgacgccactggcgaaaactcaaccccgtctcttttactatcagtcgggcaagattgcgttcactcatcgcaaaaaagccagcccattgccccaatgccccccactcgacaggccctttcgccatcatctccaccatcgtgcggattttaggatgagaagaaacgggcaggtgcagctgttgttgtggctgctgagggagttcatcaaacaggacctgaattaatctgcgggtcattggctcagcacgctgagtcgtcgtcctgtttgccagggttaaaattaattcccggcataaggggcttattttcaatgtgcaacatgttgtcggcattgtcactgcgctgggttcgataaacagaaaacagagttcagcattagctgttacttgattgctatgttccaccccgcccggtatccaaaccgcatattgtggcggcaccatccacaaagcattttccaccgtacaggtaattgcaccatgtagcgccagtatcagctgtcctttgcggtgctgatgtacaggactggttaactcatccgttccggcgtgaatacaaaatgcgaccgcggcttcatggtgtcggtcgggttcatagccattgagattcaacctgtgcatcattttgtccgaacttagcgataatttgtcattttagcttgattcaacataacaataaaaacggtaaggtacagcctcgtttgtaacaatgagaagcatatgacctgtagtactagtttaagcggcaaaaacaggattgtccttatcgctggcattctgatgattgccacaacattacgcgtcacctttaccggcgcagcaccgttactggatacgattcgttccgcttacagcctgacgacagcgcaaaccggcttattgaccaccctgccattattggcctttgcgctaatcagtcctttggctgccccggtagcgcgacgttttggtatggaacgtagcctgtttgccgcgttacttttgatctgtgctggtatcgcaattcgctctctccctagcccttacttattatttggcggtacagcggtcattggcggtgggattgcattaggcaatgtcttactgccaggattaattaaacgcgatttccctcattccgtcgccagacttaccggcgcatattccctgacaatgggagctgcagcggcactgggaagcgctatggtcgtgccgctggctttgaacggttttggctggcaaggcgcgttgctcatgctgatgtgttttcctctgctggctctttttttatggctgccacagtggcgaagtcaacaacatgcaaatttgagtaccagccgcgccttacatactcggggtatctggcgtagtccgcttgcctggcaggtcacattgtttcttgggatcaacagtctggtctattacgtgattattggctggcttccggcgatcctcatcagtcacggctatagcgaagcacaggcgggtagtctgcatggtttgctgcaactagccacagcagcacccggtttgctgatcccacttttcttacatcatgtgaaagatcagcgtggtattgcagcgttcgttgccttgatgtgcgcagtgggcgcggttgggctctgctttatgccagcgcacgcgatcacctggactctgcttttcggttttggttccggcgcaacaatgatactggggttgacgttcattggtctgcgggctagttctgcgcatcaggcggcggcactcagcgggatggcacaatccgtcgggtatttgttggcagcctgtgggccgccgctgatgggtaaaatacacgatgctaacggtaactggtctgtaccacttatgggtgttgccatacttagtctactgatggcgattttcggactttgcgccgggagagacaaagaaattcgctaatatccggtgctatagtgacgtaacaaatcatgcgtgaaagggagaacaaacacgatgaatattcagtgcaaacgcgtttatgatccggctgaacagagcgatggttatcgcatactggtcgaccgcctctggccgcgcggtatcaaaaaaaccgatttagcccttgatgagtgggataaagaaatcacgccgagtacggaactgcgcaaagcctttcacggcgaagtcgtcgattatgcaacctttcgcgagcaatatcttgcagaactggcgcaacacgagcaagaaggaaagcggctggcggacatcgccaaaaaacagccgctgaccctgctctacagtgcaaaaaacaccacgcagaaccatgcgctggtgctggccgactggctacgtagcttgtgattttagtacagcatccggcggttatttttcaccagccggatggtcacgccgccacaatgcccattcatcaatcgtttcaccgcccggtaatttgcaattgttgctgaccccttgcgctgtctgcactggaatgagcgtcccgcccttctgctggcaatagacgctcgccggatttgccataccaatctgcggcggtttaggtgcttctggctgagaaggggtactacaaccagccaggaccagcaagcaaggcagaacaaaactgataattttcatttattgatctcacatatttatccaagattagagtatcgcggtatcgttttgttttgcagcactatttttattacattcactcaaaacatattacgtcttgtttcatctttgttgatgatgttttatcatgcctgcaaagattaaataatcagcatttacccgccgtatcctggagttgttccgtgagtgatcagattatcgcccgcgtcagccaatcccttgccaaagaacagagtctggaaagtctggtccgacagcttctggagatgctggaaatggtcactgatatggaaagtacctacctgaccaaagtggatgtcgaagcgcgcctgcagcatattatgtttgcccgtaacagccagaaaatgtacatcccggagaattttaccgtcagctgggattacagcttatgcaaacgcgccattgatgaaaactgctttttcagcgatgaagtccccgaccgttggggtgactgtattgcggcacgcaatcttggcatcaccacatttctgagcacgccaattcacttaccggatggaagtttctatggcacgctttgcgccgccagcagtgagaagcgccagtggagtgaacgcgcggaacaggttttacagttattcgccggactgattgcacaatatattcaaaaagaggcactggttgaacagctgcgcgaagccaatgctgcgctgattgcgcaaagctataccgacagcttaaccgggctaccgaatcggcgggcgatttttgaaaatctgacgacactgttttccctcgcccggcatcttaaccataagataatgatcgcgtttatcgatctggataacttcaaattaatcaatgatcgttttggtcataatagtggcgatctgtttctcattcaggttggcgagcgccttaatacgctccagcaaaatggcgaagttattggtcgtctcggcggtgatgagtttttagttgttagtctaaacaacgagaatgcggatattagcagcctgcgagaacgcattcagcagcaaatacgtggagaatatcacttaggtgatgttgatttgtattatcccggtgccagtcttggcatagtagaagtcgatcctgaaacaaccgatgcagacagtgccctgcatgctgccgatattgcgatgtatcaggagaaaaaacacaaacagaaaacaccttttgtcgcgcatccagcgctacattcctgaggcgtattcacatccttttgattggtgataacatgcgaatcggtattatttttccggttgtaatcttcattacagcggtcgtatttttagcatggttttttattggcggctatgctgccccgggagcataaagatgaaaaaaacaacgattattatgatgggtgtggcgattattgtcgtactcggcactgagctgggatggtggtaacgtcacctctaaaaaatagcaaaggctgcctgtgtgcagcctttgtgcaatttaagcgttaacttttaatcttcctgtagataaatagcacgacaatcgcaccaataacggcaaccacgaagctgccaaaattgaagccatcgactttaccaaagccaaacagcgtgctgatccatccgccgactacggcaccgactatccccagcaggatagtcataaagaatccacctccatctttacctggcatgatccacttcgccagaataccggcaataagcccaaaaataatccaactcagaatgcccattgtttcctcacttatctgttttgcattagcgggttagtcgctgataaaaagcatagcacaacatcgggagggcaagatttgtgacgagcatcacggaggttttttttgcgatggcgcagaaattgcgccatcaacgatcagtgataattaccaaccacaaacatcatgttcgttttccgtgtcataagaacgtacggtattcaccagatcttttatcacttcagccgccacttctggcaccagcaaagtcatcggcgtctctgtttcataatcgacagaaacgccattgctgttattggtgacggtcacggtatacgttgctttgcccatgattcatttcccgttatgaatgactttccgttgttgcgcaccttccatcaggacttcaggagccacgaagaagtcaatgttgaaataagtatcgtcagtcatggcttcaatgttgtgccacttttctggagggaacaccgcaaactgccccgcttcgataaggatcacctgatcaggctctgcactgtgttcatcagcgtagccgagatatttgaccgccccatgcataacggaaaggcgtgggtaaacccccgggcgcgttcctttatcaagatgacgttcgaatattccggcaggtgcagtttgtttattccagaaaggcgtactgcgcgtatgaatataattctgtgggatttgaagcatccttttccctccttcggtgaatgcgctgaaaacggtttattccagccgtttcagggtacgcctgataatttgcattttaaataccatttattggttactttttagcaccatatcagcgaagaatcagggaggattatagatgggaagcccgcgacaacgcgggctgaaagcatcaggattgcagcgtcgccagtcgggcagcgaaacccacgaacatcaaaccaatcagactgttgccaactttagccagtttctttttggtacgtatgtactgcgtgacaaaagcaccagatataatcaggaagctcaaatagcagaaactcaccagttccagcgtcgccgccagaataaagaaactaattcccgtatgtggggcattaacatcgataaactgtacgaaaaagctcacatagaacaaaatggctttcggattagtcaggctcaaaattaacgcgcgtttaaaaatagcaccgtattggggctcatcggatttggcctcgctatttttacccttcagggtcgcgtaaagaattttactccccagatagagcaaataaaacgcaccaagataacgtacaatgttgaataatatcggggtggtcttaattaatgtcgccactccagcccatgccagaaacatcaataccgcatcgccaataaatacaccgcaggccgcaagataaccgcctttcataccgctactgacgctatttttgagtacaaacagggtatttggccctggcaccaacacaataaaaatggccccaaccagataggtccagtaattcagaaccccgtattcagcgaacacattaacctctttaattatctttcgatcatgcgcgattaaaggtgaatatgctaaccaatctgtagcggcttagaaaggagaaaatcaggttttaacctgatatcaacccgataattgaatcattaatcaggcatgctccagactaaaattcgggtagtgctcggcaaaatactggcgtaaaaattctaccgttatccgcactttcgcactcgtcgccagcctactaacataaacggcccagacgttcgctggctggtaatattccggtagcacttgcactaaatgaccactggcaatgttttcgctaacatcccaccaggaacgcagagcaatcccctgcccatcgagacaccactgatggacaatttctccatgattagagctcagtgggccggtgactttaatcgcatgggggccttctttattgcgtaattgccagacaccaaaaggatgatcgcgctctttaatgaccaggcacggcaatgcagaaagatcggttaaatgtttcggcgcgccatgttgcgcaataaattccgggctcgcgcagagaatacggtaattggtcgccagtttgcgggcgattaaattaggggcgatgtcatcgccaatgcgaatatcgagatcgacaccttcattgaccaaatcgaccagtcggtcttccacatcaaaacgtaattccagttgcggatacgccttcgccagcgctaataacgccggagccaccacctgtcgtccaaaaccaaagctgctgataatacgcagcatcccctgcggcacctgacgcacgtcagaaagttcgtccatcatctgaccgacatcctgcaaaatccgctgcgcccattcataaatccgctctccttcttcggtaatggtgacgcggcgggtggtgcggtgtaacaacaccacgtttagcgtttgctccagcaaggcgatgcgcttgctgacgaacgccggactaacgcccagttcttccgccacggcggcaaaaccagcccggcgagccaccagcataaagacgcgcaaatcattcagcagcggtaaattattcatgattcgtgttttatgtttcaccagttacggggattaattccttttcagtcaattataggatggtgatgttgtcaattttgatggtcaggaagtgagaacccaatgatgaaaacgatgcgtattgctgcgatcccgggagacgggattggcaaagaagtccttcctgaagggattcgcgtgttacaggctgccgctgagcgctggggcttcgccttgagttttgagcaaatggagtgggcgagctgcgagtattacagccatcacggtaaaatgatgccggacgactggcatgagcaacttagccgtttcgacgccatctattttggtgccgtcggctggccggataccgttccggaccatattagcttgtggggtagcctgctgaaatttcgtcgtgaattcgaccagtacgtcaacctgcgcccggttcgtctctttcctggcgttccctgcccgctggcgggaaaacagcctggcgacatcgatttttacgtggtcagggaaaacaccgaaggcgaatattccagcctcggcggtagagtgaatgaaggtacagagcatgaagtcgtcattcaggaaagcgtatttacccgccgtggtgtcgatcgcattttgcgttatgccttcgaacttgcgcaaagccgtccacgtaagacactaacttctgccactaaaagcaacggtttagccatcagcatgccgtactgggatgagcgagtggaagcaatggccgagaattacccggagatccgctgggacaagcagcatattgatattctctgcgcgcgttttgtgatgcagccggaacgattcgatgtggtggtggcgtccaatttgtttggcgatatcctttccgatcttggcccggcctgcaccggcaccattggcattgccccatccgccaacctgaatccggaacgcactttcccgagcctcttcgagcctgtccacggttccgcgccggatatctacgggaaaaatattgctaaccctatcgccacgatttgggccggggcaatgatgctcgattttctcggcaatggcgatgagcgtttccagcaagcgcataacggtattctggcagcaattgaagaagtgattgctcacgggccgaaaacacctgatatgaaaggcaatgccaccacgccacaggttgccgacgcgatttgcaaaattattttgcgttaaggtcaaaccagtttatttgaaccgcgtcactgacgcggtttttttattcgttctttgcagtaaataacctgcgtcatttcaccttttattgtttccgtttcgtgttttatggctttccgtattcttaattgtttaatttatgtaacatgcaaattttgttacgcgtacgttaggttccgccgtacaggtattggttttgctggcaatgggactggtgatttatttagccaccagtaaatacggcaatattcgtcttggcgaaggaaaaccggaatacagcacgctctcctggctgtttatgtttatttgtgccggtttaggttcttctacgctttattggggggttgctgaatgggcctattattatcaaacacctggattaaatatcgcaccgcgtagtcaacaggcactcgaatttagcgttccctactctttcttccactggggcatcagcgcctgggcaacttatacgctggccagtttaatcatggcttatcactttcatgtgcggaaaaacaaaggtctgagcctttccggcattattgctgctattaccggcgttcgcccgcaaggcccatggggaaaactggtcgatttgatgttcctgatcgccactgtcggcgcactgaccatttcccttgttgttaccgcagcaacctttacccgtgggctttccgcgctgaccggtttacccgataacttcaccgtgcaggcatttgtgatcctgctttccggcggcattttttgcctaagcagctggattggtatcaacaacggtttgcaacgtctgagcaaaatggttggctggggcgcgttcctgctgccattactggtgctgattgtcggcccaaccgaatttattaccaacagcatcatcaatgccatcggcctgaccacgcaaaacttcctgcaaatgagcttattcaccgatccgcttggcgatggtagttttacccgcaactggaccgttttctactggctgtggtggatcagttacacccctggcgtagcaatgtttgtcacccgcgtttcccgcggtcgtaagattaaagaagttatctggggactgatcctcggcagcaccgtcggttgctggttcttctttggcgtaatggaaagctatgccattcatcagtttatcaatggcgtaatcaacgtcccacaggtgctggaaacactgggcggcgaaacagctgtacagcaagttctgatgagcttgccagccggtaaattgttcctcgccgcatacctgggcgtgatgattattttccttgccagccatatggatgcagtggcctacaccatggcggcgaccagtacgcgtaatctccaggaaggtgacgatcctgaccgtgggctgcgtcttttctggtgcgtggtgatcactctgatcccgctttccatcttgtttaccggtgctagcctggaaacgatgaaaaccaccgtcgtgctcacagcccttcccttcctcgtcattttactggtgaaagtcggcgggtttattcgctggctgaaacaggattacgccgacattccggctcatcaagttgaacattatctcccgcagacaccggttgaagccctggaaaaaacgccagtgctccctgcgggaaccgtattcaaaggcgacaactgagcgccatcatcctaacgataaaggtatccctatgagcaatctgagccctgactttgtactacccgaaaatttttgcgctaacccgcaagaggcgtggaccattcctgcccgtttttataccgatcagaacgcgtttgaacacgaaaaagagaacgtcttcgccaaaagctggatttgcgtcgctcacagcagcgaactggcgaatgccaatgattatgtgacgcgtgagatcattggcgaaagcatcgtgctggtacgcggtcgtgataaggttttgcgcgcgttctataacgtgtgtccgcaccgtggtcatcagttgttgagcggtgaaggaaaagcaaaaaatgtgattacctgcccgtatcacgcatgggcattcaaactcgatggcaacctggcccatgcacgtaactgcgaaaacgtcgccaatttcgatagcgacaaagcgcaactggttccggtgcgtctggaagaatatgccggattcgtcttcatcaacatggaccccaacgccaccagcgtagaagatcaattacccggcctgggcgcgaaagtgctggaagcctgcccggaagtccacgatctgaaactggcggcccgctttaccacccgcacgcctgccaactggaagaacattgtcgataactatctcgagtgctatcactgtggtccggcgcatccaggtttctccgactccgtacaggttgatcgttactggcacaccatgcacggtaactggacgctgcaatacggtttcgccaaaccgtccgaacagagctttaaatttgaagagggtacggatgcggcattccacggtttctggctgtggccgtgcacgatgctgaacgtcaccccgatcaaagggatgatgacggtcatttatgaattcccggtggattctgaaactaccctgcaaaactacgatatttacttcaccaatgaagagttaaccgacgagcaaaaaagcctgattgagtggtatcgcgatgtgttccgtccggaagatttacgtctggttgaaagcgtacagaaagggctgaaaagccgtggctatcgtggtcaggggcgcatcatggccgacagtagcggtagtggcatttccgaacatggtatcgcccatttccataatctgctggcgcaggtgtttaaggactaatgacatcggcggcggtattttccgccgctgggctgatttttgatggagtacagcaatgagtgactatcaaatgtttgaagtacaggtgagccaggttgaaccccttaccgaacaggtgaaacgcttcacgctggtggcaaccgatggcaaaccattacctgcgtttaccggaggaagtcacgtcattgtgcagatgagcgatggtgataaccagtacagcaatgcgtatagtctactgagtagcccgcatgacacctcttgttatcagattgccgttcggctggaggaaaacagccgcggcggttcccgctttttgcatcagcaggtaaaagtgggcgatcggttaacgattagtacgcctaataacctgtttgcgctaattcccagtgccagaaagcatctgtttatcgcgggcggtattggtatcacccctttcctgagccacatggcagagctgcaacacagcgacgtcgactggcagctacattactgcagccgaaatccagaaagttgcgcatttcgtgatgagctagtccagcatccgcaggctgagaaagtccatttgcatcatagtagtaccggaacacgactggaattagcgcgattattggcggatatcgaacctggcacacacgtttatacctgtggccccgaggcgctaattgaagcggtaagaagtgaagctgcgcgtctggacatcgccgccgatacgctgcactttgagcaatttgctatcgaagacaaaaccggcgatgcatttaccctggtgcttgcccgttccggaaaagagtttgtggtgccggaagagatgactattttgcaggttattgaaaataataaagccgcgaaagtggaatgtttatgtcgtgaaggggtatgcggaacctgcgaaacagcaatactggaaggtgaagctgaccatcgggatcaatattttagcgatgaagagcgtgccagccagcaaagtatgttgatctgttgtagccgtgcgaagggtaaacgcctggtgttggatttgtaatttgccgaagccggatgtggcgctgagcgcgcccagtccggcttcggaagattttactgcggatattcctgcaataaattgtgtaatgcttccgccatcagctcaccacgccagccggaaatcagctccggcaaattgttctgcggtttcagtttccagtgccagttcagcagttggttgatttgccgacggcttgccagcaattcggcgctgatcttatgcgtttcgctcacgtcagtaatcaggctcttaatcgctttaaacgctttacgataacccggcatgtccatcaggttaagcatcggctgcggtaaggcatcttccggcaatgtctgcgctttttccaccagcgctagcagcgttttaccgtgaaagcggatttcgctaccggataaacccaggctgtccagttcgcctaaacttcccggcatataacgcgctacgctccacaaatgctcttcacgcacgacaaagttcaccgccagatcgcgctctcgcgccttgcgcagtcgccagtcggctaacagttgcagacaggccagttggcgtgtgcgtaattgccaggcattggtgatatcacgccaggcatcttccggcgcaacgacttcctgacgacgcatttgcatcaggcggcattcatccagcgccgcaggtagccagccggaggcctccgtttctaccataagcttggcggtgatcggtaacagataccagacatccgccgctgcgtattcacactgacgttcggtcagcggtctggccagccagtcggtgcggctttcactcttgtccagcgtaacgccggaatactcttccaccatggaagcgaaaccccaactcatcgggcgtccgcagaaggcagcaaggatttgcgtgtcaatcaagggttgtggtaattcgccaaagacattgaggaacacttccagatcttcactgcctgcatggagaaattttgtgatggacggatcgcgcaggatcgctttcagcggactccagtcggtgatcccgagtggatcgattagcgccagatgctcgccatcgaaaagttgaatcaaccccagctgcgggtaataagtgcgcgtacgaacaaattcagtatccagggctatcgccggaaaggcacggacggcttcacacaaagaagccagcgcatcgtccgtggtaatcatttggtaattcaaattgttttctctttagtgggcgtcaaaaaaaacgccggattaaccggcgtctgacgactgacttaacgctcaggctttattgtccactttgccgcgcgcttcgtcacgtaattctcgtcgcaaaatttttccgacgttagatttcggtaactcatcacgaaactccaccagcttcggtactttgtatcccgtgagctgacggcggcaaaaagtcaccagactctcttcggtaaggcttggatcttttttcactacgaagattttcaccgcttcaccactggagccggaaggtacgccaacagccgcgacttcctgtacgccaggatgctgcatgacgacatcttcaatctcgttgggatagacgttaaaaccggaaaccagaatcatgtcttttttacgatcgacaatgcgcaggaatccttcttcatccattaccgcgatgtcgccggtgtgtaaccagccatttttgatgatttcatcggtagcatcgggacgctgccagtaacccagcatcacctgcggtcctttgacacaaagctcacccggttgacctggtggtacttcattatcatcatcatccaccagtttggcttccgtgctcggcaccggcaaaccgatgctaccactatgataatcaatatcatatgggttaacgctgaccagcggcgcacactcggtaaggccatagccttccagcagatactgtccggtcagtttcacccaacgctctgccaccacttgctgcactggcatcccaccgcctgcggaaagatgcagactggagaaatccagctgctggaactctttattgttcagcaacgcattgaacaaggtgttaacgcccgtgatagcggtaaacggatatttcgctaactcttttaccaaccctggaatatcgcgcgggttagtgataagcaggttctgcccacccagttcgataaacagcaggcagttaatggtcagggcaaaaatgtgatacagcggcagcgccgtcaccaccagctctttgcccggatgcaacagcggaccataggtcgcgttaacctgttccaggttcgccagcatattgcggtgagtcagcatcgcgcctttcgccacaccagtggtgccgccggtgtattgcagaaaagctaaatcttccggcaccagttcgggtttgacgtactgcatccggtagccgttatgcagtgcgctacgaaaactaatggcatctggcagatggtatttcggcaccaaacgcttgatgtatttaacaacgaaattgactaccgtgccttttgccgtagatagctgatcgcccatacgggtcagaattacgtgctgaacggcggttttatcaaccactttttccagtgtgtgagcaaagttagacacgataacaatcgcgcttgcgccgctatcgttaagctgatgctcaagctcacgcggggtatacaacgggttaacgtttacgacgatcatcccggcacgcaaaatgccaaacagcgccaccggatattgcaataaattaggcatcatcaacgcaacgcgatcgcctttcttcagccccaacccttgttgcaaataagcggcaaacgcgcgactgcgttcttccagcttgcggaaggtcattacctcccccatattcacaaacgcaggttgatcggcgtagcgcgcgacgctctgctcaaacatatctaccagagattgataacggtcagggttgatctccgtcggaacgtccgcgggataacggttaagccaaaccttcttcaattcttcacctctaaaatgcgtgttcgtcgtcatcgcaaccccaaatgatatacatgccgttaacataatattaactcatcataccagcttgataattacccaacgaaaaggttgcgaagcgcgtcactatttatttttatctttaccgtaagaatgcagaaacagcggaccagccgctgtttctttttctttaaaaacaagcaattattcagttacaactgtttgtactctcgcggggccgggattataccagccccatccgccgtagccatagggccagccacgaccgccataaaaccatggatcaatcggctgaggcggcataatcacctgctgggttaaatgccaacgtttgtaacccgttacttgcatcaccataaatttatagggcgtattgccgattttgccgtcaaccgcaccagtgattggcccgactaccgtaaccagttgtccacggaaatccaccgggtccagaaaaccgttcacatcggcataaatgcgaccgcgagaaggttctcccagcgtcggtctggctccgctgtccagcggtacggtagcaatttccaggcgagttttcccttgctggttttgtaccgcaaccactttgccaccaaagcgtgcctcctgaccaacgtacagctgcggcgcactcatcacccgaactaaatcttgttgcggcgtgggactgctgcctttaatggcgtccggcacagtgacacaaccgctcagcattagcgcaaacgtacctgccagtatgcctttgataacattcttttgaaccgccatggtgcgactcctttttttctcagggcatactcttaagattcattctttgcccggaagtttcttccatgcgacgttgttacgtaaataaaccggttcggcatgttccaccgccaccgttttaccctcagcaaacatctgacacgcaatcggcagcatatcttcagcagcaggcagtaacacttcgccatcgcgcaaaaccagcccgctctctttaccgagatccggccaagcttgccagcccgtccctaccgtcacccattcgccggaaagctgttgcattcgttcatggacgatttcgggtttgagtacggcttcggtttcttcaccgtgccagataccgttttcatcacgctgatattcggcccagtaaacttcgcccattcgcgcgtcaatggctgccagcacgcgggttgcgccgtttttgcgccacgccccttgcgccatcgtcattagcgtggagacgccaatcatcggtaattccgcgccaagcgccagcccttgcgcgatgccaataccaatgcgcacgccagtaaagctaccggggccgcgcccgtaagccagagcgttaatatcagtcagggaagttccgctggtggtcaggatatcctgcaccatcggtaagattcgttgagtatgttcacgagggcaaagctcaaaatgagcgttgacagtaccgtcgttccacagggcgacagagcaggcctctgtcgcggtatcgatagccagaattcgcatgggtcttcgtgcttagatcaataaaaaggcgcgcatcataccatactccgtaacaaattacctggaggatggtatcgcaaggaaacgaaccgcacgggcaatgtcacgggtgcgtggcgcgggcggcagactggcgagaaacgtcgcgccgtaaggacgcatcaccagccgattgtcacaaatcaccagcacgccacgatcgtcggcgtcgcgaatcagtcgccctaccccctgtttgagagtaatgacggcatctggtagttgcacttcatcgaacgggtcgccaccgcgcaaacgacaatcttccatgcgcgcttttaacagtggatcatccgggctggtaaacggcaatttgtcgataattaccaaactcaatgtatcgccacgcacgtccaccccttcccagaaactgctggttgccacaagaagcgcattaccggcgctgacaaattgctgcaacagttgccctttgctggtttccccctgcaacaatacaggaagcgtcatggtagcgcggaactgctcggccagatcgcgcatcatggcgtggctggtacaaagcataaaacaacgaccgttgttagcttcgatgatcggtcgcagcattgccgctaactggcgagcagaacctggctggttggtttgcggcagattgcgcagcacacagagtaacgcctggcggctgtaatcaaatgggctgggcaacagcaagctctcggcctgttcgatgccaagccggctggtgaaatgatgcagatcgtcgttcacgctcagcgttgcactggtgaagatccagctaccgggtttttgcgccattaactctttgaatttatccgccacgctgagcggcgtgagagccagagtaaaatggcggctagtgcattcgtaccagtagctgtagcccggctgattgatctcttttagccgcttcagccgtgtgcgatacaacgtggcgcgctcaaatgccgcatccagcaaggcggaacgccccagactcagtttcgccacgtcataacaaagttccagggtgtcatcgagcagtaaaaatgcccgctgaatttgcggattagctaacagctcacgcaggttaccgcgataacctggctcaccgagttgcagacgaaaatcctgcgcactctgggcaagacgatcagcgcacttttgtaactgctgggtgtcttttaattcggtgcggtaggcgatggtgatgtcttttgccaggtcgagcagttgtcgactggagagactctgaccaaaatactggctggcaatgtccggtagctggtgggcttcgtcgaagatcatgacgtccgcttccgggatcagttcgccaaatccactctctttaaccaccatatccgccagaaagagatgatggtttaccaccaccacatcggcgtccatcgcttttttacgtgctttgaccacaaagcaatctttatacatcgggcagtcgctgccaagacagttgtcgttggtgctggtgaccagcggccacgcctgactatcttccgccacgctgacgcaggtgctgatatcaccatcgactgtttgattagaccaggagcgcagcaggatcacatcgcttaagatttgtaccggcagatcgccccccgccagcgcctgctgttcgagacgttcgaggcagaggtagttactgcgccctttcagcagcgccacgttgcccgtatatttcaatgccttactgactgttggcaaatcgcggctgtagagctgatcctgcaacgctttactgccggtgctgataatgactttctttttcgcccgcagcgcaggagccaggtaagcgtaggttttgcccgtaccggttcctgcttccaccaccagcggctggcctttttctatcgcctgggtgacggctaccgccatctgtcgctgtggttctcgcggcttaaagcctggtatcgctttcgccagctgaccgtctggtgcaaaatcgtccgtcacactaccccctgttgatttgaacagggattatgtcaggatgagggcgctttcgccagttgaagtggtgacggcgacctcacattgtggcagtctttgcagcacgaaaatggaagtataatgaggacaaaatgatgactatcgttcgtatcgatgctgaagcccgctggtctgatgtagtaatccacaacaacacgctctactacactggtgtaccggaaaacctcgacgccgatgcctttgagcaaaccgccaacacgctggcacagattgacgccgtgctggaaaaacagggcagcaataaaagcagcattctggatgccaccattttcctggccgataaaaacgacttcgcggcgatgaataaagcgtgggatgcttgggttgtcgcgggtcatgcgccggtgcgctgcacggtacaagcgggtttgatgaacccgaagtataaagttgaaattaagattgtggctgcggtgtaagctttatcgaagcaaaataagtcagacgataatttatcgataatactggtcggttttacataaatcgaccagagaataagatattactgttgatgcttctgctaattcattatttatatttataatttcaattttatctataaaactaactatataaataaacataaacatgccgttgtgttcgccctttgattagcaactctggttttctttcttagctgaacaatctggttatagcgtgcggactgaccgttaaatttctccatcttactggataacacaccatgagctgctacctttaaaacacctgaatgtcaacaggttaactcgtgccatatcgttataatccctttgatattagatgcaaattaaggtcatatatagccttatcgataacatggttaattttaaggataagaatatgcctgctgtaatagataaagccctggatttcattggtgccatggatgtaagtgcgccaacaccaagtagcatgaatgaaagcacggcgaagggaatctttaaatatttaaaagaactgggagtacccgcgagtgccgctgatattacggcgcgagctgaccaggaaggctggaaccctgggttcacggaaaaaatggttggatgggcaaaaaaaatggagacaggtgaacgttctgtgattaaaaatcctgaatactttagtacatatatgcaggaagaactaaaagcactggtctgagttaaatttatatcagcataaatgggtcaggacgcttttaatcacatataaaaagcgtcctttttctcacaatcaaatgatcatcggcttctataacgaaatcgatacggattagtgtgttactcgtcttcatcctcaaaacgcgccacgattcgctcgccggagtggttggcacgcagctcttctgccaccagcgcgattgcctggccgctgctcatcccttgtgccatcagttcctggatccgctcgacagctttttgctgctgttcatgggtgagactaggtaaacctgcaaacattgttaactcctgctaaattgttggcgctaattatttcatgctacccggcacatagccagtagagtcaggactgatgaagacgttatctcccgctgtgattactttactctggcgtcaggacgccgctgaattttatttctcccgcttaagccacctgccgtgggcgatgcttttacactccggctatgccgatcatccgtatagccgctttgatattgtggtcgccgagccgatttgcactttaaccactttcggtaaagaaaccgttgttagtgaaagcgaaaaacgcacaacgaccactgatgacccgctacaggtgctccagcaggtgctggatcgcgcagacattcgcccaacgcataacgaagatttgccatttcagggcggcgcactggggttgtttggctacgatctgggccgccgttttgagagtctgccagaaattgcggaacaagatatcgttctgccggatatggcagtgggtatctacgattgggcgctcattgtcgaccaccagcgtcatacagtttctttgctgagtcataatgatgtcaatgcccgtcgggcctggctggaaagccagcaattcagcccgcaggaagatttcacgctcacttccgactggcaatccaatatgacccgcgagcagtacggcgaaaaatttcgccaggtacaggaatatctgcacagcggtgattgctatcaggtgaatctcgcccaacgttttcatgcgacctattctggcgatgaatggcaggcattccttcagcttaatcaggccaaccgcgcgccatttagcgcttttttacgtcttgaacagggtgcaattttaagccttagcccagagcggtttattctttgtgataatagtgaaatccagacccgcccgattaaaggcacgctaccacgcctgcccgatcctcaggaagatagcaaacaagcagtaaaactggcgaacagtgcgaaagatcgtgccgaaaatctgatgattgtcgatttaatgcgtaatgatatcggtcgtgttgccgtagcaggtagcgtaaaagtaccagagctgttcgtggtggaacccttccctgccgtgcatcatctggtcagcaccataacggcgcaactaccagaacagttacacgccagcgatctgctgcgcgcagcttttcctggtggcagtataaccggggctccgaaagtacgggctatggaaattatcgacgaactggaaccgcagcgacgcaatgcctggtgcggcagcattggctatttgagcttttgcggcaacatggataccagtattactatccgcacgctgactgccattaacggacaaattttctgctctgcgggcggtggaattgtcgccgatagccaggaagaagcggaatatcaggaaacttttgataaagttaatcgtatcctgaagcaactggagaagtaagacgtggaataccgtagcctgacgcttgatgattttttaagccgctttcaacttttgcgcccgcaaattaaccgggaaaccctaaatcatcgtcaggctgctgtgttaatccccatcgtccgtcgaccgcaaccggggttgttgctgactcagcgtagcattcatctgcgtaaacacgctggacaagtggcattccctggaggtgcagtcgatgacacggacgcaagtgctatcgccgccgcgctgcgcgaagctgaagaagaggtcgctataccgccttccgccgttgaagttatcggcgtgctgccgcccgtcgatagcgtcactggctaccaggtaaccccagtggtcggcattatcccgcccgatctgccgtatcgcgccagtgaagatgaagtcagcgcggtgtttgaaatgccgctcgcccaggcattacatctgggtcgttatcaccctttagatatctaccgccgtggtgatagtcatcgggtatggctgtcctggtacgaacagtattttgtatggggaatgaccgcaggcataattcgtgagctggcgctgcaaattggtgtgaaaccctgactatacttatctttacatctacaaaacactacttgagacaatcatcgcaatattagttaaatcgcggtttttgattagtttaattcatgtgaatagttaagccagtcgccgcgttccctcttacactatgcgctgttattagttcgttactggaagtccagtcaccttgtcaggagtattatcgtgattagtctattcgacatgtttaaggtggggattggtcccagttcttcccataccgtagggcctatgaaggcaggtaaacagttcgtcgatgatctggtcgaaaaaggcttactggatagcgttactcgcgttgccgtggacgtttatggtagtctgagcctgacgggtaaaggccaccacaccgatatcgccattattatgggtcttgcaggtaacgaacctgccaccgtggatatcgacagtattcccggttttattcgcgacgtagaagagcgcgaacgtctgctgctggcacagggacggcatgaagtggatttcccgcgcgacaacgggatgcgttttcataacggcaacctgccgctgcatgaaaacggtatgcaaatccacgcctataacggcgatgaagtcgtctacagcaaaacttattattccatcggcggcggttttatcgtcgatgaagaacactttggtcaggatgctgccaacgaagtaagcgtgccgtatccgttcaaatctgccaccgaactgctcgcgtactgtaatgaaaccggctatagcctgtctggtctcgctatgcagaacgaactggcgctgcacagcaagaaagagatcgacgagtatttcgcgcatgtctggcaaaccatgcaggcatgtatcgatcgcgggatgaacaccgaaggtgtactgccaggcccgctgcgcgtgccacgtcgtgcgtctgccctgcgccggatgctggtttccagcgataaactgtctaacgatccgatgaatgtcattgactgggtaaacatgtttgcgctggcagttaacgaagaaaacgccgccggtggtcgtgtggtaactgcgccaaccaacggtgcctgcggtatcgttccggcagtgctggcttactatgaccactttattgaaagcgtcagcccggacatctatacccgttactttatggcagcgggcgcgattggtgcattgtataaaatgaacgcctctatttccggtgcggaagttggttgccagggcgaagtgggtgttgcctgtagtatggctgctgcgggtcttgcagaactgctgggcggtagcccggaacaggtttgcgtggcggcggaaattggcatggaacacaaccttggtttaacctgcgacccggttgcagggcaggttcaggtgccgtgcattgagcgtaatgccattgcctctgtgaaggcgattaacgccgcgcggatggctctgcgccgcaccagtgcaccgcgcgtcagcctggataaggtcatcgaaacgatgtacgaaaccggtaaggatatgaacgccaaataccgcgaaaccagtcgcggtggtctggcaatcaaagtccagtgtgactaatacttcttactcgcccatctgcaacggatgggcgaatttatacccgctttctcgtctgctgtaatattccccactacacttccactgttgcgtcaggcgtttgtcgccatacgcttacagggtggcccgcatgcaaaaagcacaacggatcattaaaacctatcgtcgtaatcgaatgattgtttgtacgatttgcgcactcgttacgctcgctagcaccctgagcgtgcgatttattagtcagcgtaacttaaatcaacaacgggtagtacaattcgccaatcacgctgtagaggaattagataaagtactgcttcccctacaggcaggtagcgaagtcttgcttccgctgattggtctgccctgctctgtcgcccatttgccattacgtaaacaggcggcaaaactccaaactgtgcgatccattggcctggtgcaagacggcacactttattgctccagcatttttggttatcgcaatgtgcccgtcgtggacattctggctgaacttcctgcaccgcaaccacttttacgcctgacgatcgaccgtgccctgattaaaggcagtccggttttgattcaatggacgcctgcagcgggcagtagcaatgctggggtcatggagatgattaacatcgacttactgacggcaatgctgcttgagccacaactgccgcaaatcagtagcgccagcctgacggtggacaaacggcatttgctctatggtaatgggctggtagattcccttccgcaacctgaagacaatgaaaactatcaggtttctagccaacgctttccttttaccattaacgttaatggtccgggggctacggcgctggcatggcactatcttccaacacaattaccgctggcggtgctgctaagtttactggtgggctacatcgcctggctggcgaccgcttaccgaatgagcttttcccgcgaaatcaatctgggcctggcgcaacatgagttcgaattgttctgtcagcctttgcttaatgcgcgcagccagcaatgtattggtgtagagattttgctgcgctggaacaatccgcgtcagggctggattagtccggatgtgtttattcctatcgcggaagaacatcatttaattgtgccactgacccgctatgtgatggcagaaaccattcgtcagcgccatgttttcccgatgagtagtcagtttcatgttggcattaacgtcgcacccagccattttcgccgtggtgtgctgataaaagatctcaatcagtactggtttagcgctcacccgattcagcaactgatcctcgaaatcaccgaacgcgatgccttactggatgttgattatcggattgcccgcgagctgcatcgtaaaaacgtcaaactggcgattgatgacttcggcaccggcaacagcagcttttcctggcttgaaacattacgtcctgacgtgctgaaaattgataagagttttaccgcagctataggttctgacgcggttaacagcacggtgaccgatatcatcatcgcgctggggcaaagactgaatattgaactggtggcggagggcgtggaaacgcaagaacaggcgaagtatttgcgccgtcatggcgtgcatattttgcaagggtatttgtacgcacagccgatgccgctacgtgattttcccaaatggctggcgggcagccaaccgccgcccgcccggcataatggacatatcacgcccattatgccgttacgttaacgcttactcatcttcatcgtgcgccggttgctctttaacaatgcgaaccagatcaacacgataatcattggcttcaatgatggtgatatgcagtggccctacatcaatcacatcgcccacacggggaatgtgaccatttgcgctgatcacgaggcccgcgaccgtcgcgatatcatcgtcatcggcaaggtgctcaacatcaagcgcctgctgcaaggcatgcaaatctgtaccgccttttaccagccagccgtcaccatcagtaatgatttccggcgtttcgtcagcgtccgggaattcacccgcaatggcttccagcacatccagcggcgtgaccagaccttgtaccacaccaaactcgttggtcacgataacaaagctcccgcgagcacgacgcagcacgcccaacaggttgatcggatcgagggtttccgggacgataatcgccggagacgcgctagcaatcgccgccacatcaacgccctcttccagcgccaccagcagttctttagcacgtacaataccgatgatttcatccagttcaccgcgacataccgggaacagactgtgcggactagagagcagttgctcgcggatttcatcgaccccgagattagcgtcaacccagcttatttcaccgcgcggcgtcatgatcccgcgcagagaacggctcgccagcgtcagtacgccgttaatcatgtaacgttcttcttcggcaaatgcaccttccgggatcggcatcggcatcgggttatcggcatcgtgctgaacattggcctgacgtttcccgcccatcaaacgcaggatggcatcggcagtacgcgctcgcagcggcaaagtgctctggtggcgaataaagttgcgacgcgcaatctggttaaacacttcgatgatgatgctgaagccaatcgcggcatacaggtagcctttcggaatgtggaaaccgaaaccttctgccaccagactcagaccaatcattaacaggaagctcagacagagcaccaccaccgtggggtgctggttaacgaatcgcgtcagcggtttggatgccagcaacataaccgccatcgcaatcactaccgccgccatcatcaccggcagatggttaaccatccctactgcagtaattaccgcatccaagctgaagacggcgtcaaggatgacaatctgtgtgacgaccacccagaaactggcgtagcctttaccgtggccggaatcatgatcgcggttttccagccgttcatgcagttcggttgttgctttgaacagcaagaatatccccccgaacaacataatcaggtcgcgtccggagaaggagaaatccatgacggtaaatagcggtttggtcagcgtgaccatccaactaatcaggctcagcagccccagacgcataatcagcgccagacttaaccccagcaaacgcgctttatcgcgttgttttggcggcagtttgtcagcaagaatggcgatgaagaccaggttatcgatacccagcacaatttcgagaacaacaagcgtgagtagccccgcccaaatactggggtccattaagaattccatgacaagctcctgcttaaggaatagctattcgacgccagaaataatgcaggcgtaacgacaaaatgcaaacgaaaggtgcggcatagagtgccagaaaggcaggcgttaaaaggcctgatgctgaaatgacgtcggtgacgatccatactgcgggctactgccctatactccatggttgttaaacgggagttaaacatatcagagacgcctctgatttggcaaagatttaccttcctttgcaaacgaatgtgacaaggatattttacctttcgaaatttctgctaatcgaaagttaaattacggatcttcatcacataaaataattttttcgatatctaaaataaatcgcgaaacgcaggggtttttggttgtagcccttatctgaatcgattcgattgtggacgacgattcaaaaatacatctggcacgttgaggtgttaacgataataaaggaggtagcaagtgaccattgctattgttataggcacacatggttgggctgcagagcagttgcttaaaacggcagaaatgctgttaggcgagcaggaaaacgtcggctggatcgatttcgttccaggtgaaaatgccgaaacgctgattgaaaagtacaacgctcagttggcaaaactcgacaccactaaaggcgtgctgtttctcgttgatacatggggaggcagcccgttcaatgctgccagccgcattgtcgtcgacaaagagcattatgaagtcattgcaggcgttaacattccaatgctcgtggaaacgttaatggcccgtgatgatgacccaagctttgatgaactggtggcactggcagtagaaacaggccgtgaaggcgtgaaagcactgaaagccaaaccggttgaaaaagccgcgccagcacccgctgccgcagcaccaaaagcggctccaactccggcaaaaccaatggggccaaacgactacatggttattggccttgcgcgtatcgacgaccgtctgattcacggtcaggtcgccacccgctggaccaaagaaaccaatgtctcccgtattattgttgttagtgatgaagtggctgcggataccgttcgtaagacactgctcacccaggttgcacctccgggcgtaacagcacacgtagttgatgttgccaaaatgattcgcgtctacaacaacccgaaatatgctggcgaacgcgtaatgctgttatttaccaacccaacagatgtagagcgtctcgttgaaggcggcgtgaaaatcacctctgttaacgtcggtggtatggcattccgtcagggtaaaacccaggtgaataacgcggttagcgttgatgaaaaagatatcgaggcgttcaagaaactgaatgcgcgcggtattgagctggaagtccgtaaggtttccaccgatccgaaactgaaaatgatggatctgatcagcaaaatcgataagtaacgtattgtgttgattatcactcagttttcacacttaagtcttacgtaaacaggagaagtacaatggagattaccactcttcaaattgtgctggtatttatcgtagcctgtatcgcaggtatgggaagtatcctcgatgaatttcagtttcaccgtccgctaatcgcgtgtaccctggtgggtatcgttcttggggatatgaaaaccggtattattatcggtggtacgctggaaatgatcgcgctgggctggatgaacatcggtgctgcagttgcgcctgacgccgctctggcttctatcatttctaccattctggttatcgcaggtcatcagagcattggtgcaggtatcgcactggcaatccctctggccgctgcgggccaggtactgaccatcatcgttcgtactattaccgttgctttccagcacgctgcggataaggctgctgataacggcaacctgacagcgatttcctggatccacgtttcttctctgttcctgcaagcaatgcgtgtggctattccggccgtcatcgttgcgctgtctgttggtaccagcgaagtacagaacatgctgaatgcgattccggaagtggtgaccaatggtctgaatatcgccggtggcatgatcgtggtggttggttatgcgatggttatcaacatgatgcgtgctggctacctgatgccgttcttctacctcggcttcgtaaccgcagcattcaccaactttaacctggttgctctgggtgtgattggtactgttatggcagtgctctacatccaacttagcccgaaatacaaccgcgtagccggtgcgcctgctcaggcagctggtaacaacgatctcgataacgaactggactaacaggtgagcgaaatggttgatacaactcaaactaccaccgagaaaaaactcactcaaagtgatattcgtggcgtcttcctgcgttctaacctcttccagggtagttggaacttcgaacgtatgcaggcactgggtttctgcttctctatggtaccggcaattcgtcgcctctaccctgagaacaacgaagctcgtaaacaagctattcgccgtcacctggagttctttaacacccagccgttcgtggctgcgccgattctcggcgtaaccctggcgctggaagaacagcgtgctaatggcgcagagatcgacgacggtgctatcaacggtatcaaagtcggtttgatggggccactggctggtgtaggcgacccgatcttctggggaaccgtacgtccggtatttgcagcactgggtgccggtatcgcgatgagcggcagcctgttaggtccgctgctgttcttcatcctgtttaacctggtgcgtctggcaacccgttactacggcgtagcgtatggttactccaaaggtatcgatatcgttaaagatatgggtggtggcttcctgcaaaaactgacggaaggggcgtctatcctcggcctgtttgtcatgggggcattggttaacaagtggacacatgtcaacatcccgctggttgtctctcgcattactgaccagacgggcaaagaacacgttactactgtccagactattctggaccagttaatgccaggcctggtaccactgctgctgacctttgcttgtatgtggctactgcgcaaaaaagttaacccgctgtggatcatcgttggcttcttcgtcatcggtatcgctggttacgcttgcggcctgctgggactgtaagactgttgtacactaccggggccttttggccccgtttttttatctggaggattaatgacaatcacggacctggtactgattcttttcatcgccgcactcctggccttcgcgatctacgatcagttcatcatgccccgccgtaacggccccaccctgctggcaattcctttgctccggcgtggtcgcatcgatagcgttatcttcgtcggattgattgtcattcttatctataacaacgtcacgaatcatggtgcgttaataacgacatggttattaagcgcactggctctgatgggtttttatatattctggatccgcgttccgaagatcatctttaaacaaaaaggttttttcttcgccaatgtctggattgaatatagccgaatcaaagcgatgaacttgagcgaagatggcgtgttggtgatgcaattagaacagcgtcggctgttaatccgcgttcgaaatatcgacgatctggaaaaaatttataagcttctcgttagtactcaataagttatgaatttagccaaagctatgtttagtgtatttttaataatcagacatagcttaggctatattacctcttcccttatttgttatttattttaacgtttcattgatatataaatccaaatgaaaatcgttatcaataaagcaatgaaataatatattccaacagttgttttatattctcaaaatatgttaaggttgcgccctcatttggggagtagccgatttccagattccggaaatgtacgtgtcaacatactcgttgcaaaacgtggcacgtacggactgaatactttcagtcaggcgagaccatatgcacatcaatcgctatgcctgcatgaacgcgaaaaccatcacggcttgttgttcatgtatgcatgtttgctgggggcgatgatgtgttttatggataccccggtcaggacattgtcatgaatatcactgctactgttcttcttgcgtttggtatgagcatggatgcatttgctgcaagtatcggtaaaggtgccaccctccataaaccgaaattttctgaagcattgcgaaccggccttatttttggtgccgtcgaaaccctgacgccgctgatcggctggggaatgggcatgttagccagccggtttgtccttgaatggaaccactggattgcgtttgtgctgctgatattcctcggcgggcgaatgattattgagggttttcgtggcgcagatgatgaagatgaagagccgcgccgtcgacacggtttctggctactggtaaccaccgcgattgccaccagcctggatgccatggctgtgggtgttggtcttgctttcctgcaggtcaacattatcgcgaccgcattggccattggttgtgcaaccttgattatgagtacattagggatgatggttggtcgctttatcggcagtattattgggaaaaaagcggaaattctcggcgggctggtgctgatcggcatcggcgtccagatcctctggacgcacttccacggttaataagaacgctgccagaggtgaatattaaagtccgtctggcagtcgaacacttcttttgctgccagtgtttgccagacttctggcttcgcacgccaggcaaacggcgtcatctgcaataatgcgacggcttcatcaccgcgaagacgcatcggataacacaactccgcactctgctgtaatgtaaaaccttccagttgttctgcatgaggtgcatgaagatgtacttcattgtaaatcagccccttcagctccatcaaatgtcgcggtcccggcgtggcagtaatgacccagccgccgggcttcactactcgtgctaattcttctgctttacacggcgcgtaaatacgtattatggcgtccatactggtatcggaaaacggcaaacggtggctggaagcgacacaaaaagtgacctgcggatagcgtttcgccgccgcttttatcgctaccttgctaacatccagaccaaacgtggtgatttcgggcaacgcatcggcaaatgcgtgtgtgtaatacccttcaccacagccaatatccagcaccgccgtggccttatcatcaagccgttccctcagttgggcgacaattgcatcacgcagcggctgataatgtccggcatctaagaatgcgcggcgtgcttgcatcatttccgcgctgtcgcccggatcacgagaccgtttatgctgaacgggcagcagattgacatacccttctttcgccatatcaaactgatgtcgctggggacagatatagctgtttttttcacggctaagaggctgatggcaaagtggacaggaaaaagacatgacaactccggcaggatactaaaggccgcaagtgtaacgcgaatcacgcggcgggcaaatatccgaacgccaggagcgaagataaagcatagtaaaaagcctcgcattcgacgaggctttatagcgagattgaagcgtattcacacttcagatcagtggattcgatcagatagctgttacgttaacagctgccggacctttctggccgtcctgaatttcgaactcaacgttctgaccttcagccagagttttgaagccattaccctggatagcggagaagtgtacgaacacatctttgctgccatcagccggagtaatgaagccaaaacctttagactcgttgaaccacttaacctgacctttaatctttgccatttgaaaaattccttagattgttttcttcgcccgcaggcataacatagataaaacactcacattactgcaactggcaccaatataaggctcggcagagaagcggtattcaacgtcaacgtgtttactcaggacttctttactgaaaatgccacacataaacagaactgtacctcgtttaacccgaaatctgttatcacatacaacgttaattatggcaagccatttttaaacatgtctcgatcagacgcacaaatctcgatacgtcttccactttttttgcacacttatgcaacggaatacgcgccgatatatcattgtgcttaaccttgccagttcaggcagatacttaaactggcgtattttctaacatagttcaataagttcagttgttccaggccagtgggagaagttattacatagtgcgtgcaatatcacattttttgctatgcaatgaataaaaagttatatcactttttctcataaaacagtcagttaacggctattaattaccctaaagagaagtcaatccccaaagggattgtaaatttaaaataagaaaaattgatgaatgagcaaaaaaatcaagagagaaacgtttcgctaataaataataccacgcttaatcacaaatccgatgtaaacatcctaataaattaatggggtaaatatctttttctgatatcccgttacgcaaataaataatatgataattatttgaagtcagaccagagttttaatttgaagcagttgcaccatgacagtgcgtataatcaggatgaattgagtaacccttcaacgacggggttactcaagattgaggaaggattatcgttcggcgaccagacgaataatatcttcgtcttcaacgcttttttgactctcaacggtctttttatctgctttctctggttcgtttgcttcgcacaaacgacgtaacagtgcattttgacgtttttgctgatccagcaacgcctcaagcagttcaatctgttcgttagtccgactactggcacgattgataaaaaaccacaagatgagcccgataagaagaaccaccacgcttacaaccaaagacgcaatgttcatcacgccactatttacaacttcgttcatttcaccacctctgagtagaggcgctattctaccactgctggagaggaagaaaatctagtgctgaaaaaatgatatcaccacgggataaactggttaatggcacaaattccgctgaaaaattgtacatcctgatcgcacatcatgttgaatacctgcgcccaaagcagcaagcaagccaacaccacgacaaccagaacgacccatcgaaactttttcactccaatctccgtttcacctaccttatgtcattaaactagcatgcgttagttaaacagcgcctaactatgtcgatattcgtgctttttcggaatgagtcgcttgcttcagcgcatattgccgctacgattaagcgaacataaaaagagaagaggttgtaatgcgattcatcattcgcacagttatgctgatagcactggtatggataggattattactcagcggatatggcgttttgattggaagcaaagagaatgccgcaggattaggtttgcaatgtacctatctgactgccagaggcaccagcacggtacaatacttgcacactaaaagtggtttttttggggataacagattgcccgctgttacgcaaaagcaatatcgtggtcgataatggttaagggcaataaataaccagattctcactcctgagtaaaatactcttatagcaagcgcgtttaatataacgccaccttcaactttatttttctcatgctaaataaagaacctgtctgtttgatattccgacaggttcttactctcatcagaacggatagtcgtgataacccatttgggcagaaattttgcgcgctgcggtatgcaacattgcgacatattcctgtaaacgctcttcagagaaacgcaacgtcgggaaggagatgctcaaaccggcaatgaccacgccaaagcgatcaaataccggtaccgcaatgcatcgcagcccttcttcctgctcttcattatcttcgccatacccctgctcgcgcacctggtccagaacgggtaataacgcttctgtactggtgatggtccgctcggtactgcgtttatactccacgccctcaagaatttgcttcacttcatcgcgatcgcgccatgccagcagtaccttaccaatcgcggtgctgtacagcggattacgacgcccaatccgactatacatgcgcaaattgtacatagagtcaattttgtgaatgtaaacaatactgtcttcgtccagtgcgccgaggtggatagtttctttggtcaggcgggagagctcacgcatctggatatctgcgctacgaattaaatcgacgttttgtaacgcgcgagcgcccagttcaaacaatttcagggtcagggaatatttctcgctctccccttcctgcgccacataacctaaggttttcatggtctgtaaaaagcgataaacggtgcttttactcatcatgacgcgctggctcagctcggttatccctatttcgcgctcttcacccagcgcctgcaaaatgccaaaaacttttagcacggaagatacagaatcaggctgtttatccagatctgcgttagccatttatcacctcattgcgagtgttttataaaaatcagaactgttttttattataatttcgcaccagggtggtcgcaatccatcttttgccggttagttacaattctgcgacatccaccgtgaatatcagtgctagaatcatacccctgttgattattcaccaaagatataaaattcctatgccaaaagttcaggccgacggcctgccattgccccagcgatacggtgcgatattaaccattgtgattggtattagcatggccgtccttgacggcgcaatcgccaacgtcgccctgccaacaatcgccacggaccttcatgccacgccagccagttccatctgggtagtgaacgcctatcaaatcgccattgtcatctccctgctcagctttagctttctgggcgatatgtttggctatcgacgtatttataaatgcggtctggtcgtttttctgttgtctagtctgttctgcgccctttctgatagcctgcaaatgctcacccttgcgcgtgtcatacaaggtttcggcggtgcagcgttgatgagcgttaataccgcacttatccgcctgatctatccacaacgttttctgggtagagggatgggcataaacagctttattgttgccgtctcttctgctgccgggccgacaattgctgcagcaatcctctccatcgcatcctggaaatggttatttttaatcaacgtaccgttaggtattatcgccctgcttctggcgatgcgttttctgccacccaatggttctcgcgccagtaaaccccgtttcgacctgcccagcgccgtgatgaacgcgttaaccttcggcctgcttatcactgcgttgagtggtttcgctcaggggcaaagcctgacgttaattgctgcggaactggtggtaatggttgttgttggtattttctttattcgccgccagctttctcttcccgtaccgctgctaccggtggatttactgcgtatcccgctgtttagtctttctatttgcacatctgtttgctctttctgcgcacaaatgctggcaatggtttccctgcccttttacctgcaaaccgtgctcgggcgtagtgaagtcgaaacaggtttacttctgacaccgtggccgttagcaacgatggtgatggctccgctggcaggctatttgattgaacgcgtacatgcaggattgctgggggctttagggttgttcatcatggctgcggggcttttttccctggttctgctgcccgcgagtcctgcggatatcaatattatctggccgatgatcttatgtggtgctggatttggcttattccagagtcccaataaccacaccattattacctccgcgcctcgcgaacgtagcggtggagccagtggcatgttaggaacggctcgtctactgggtcagagtagcggcgcggcgctggtggcgctgatgctaaatcagtttggagataatggtacacacgtcagcctgatggctgcggctattctggcagtgattgctgcctgtgtcagtggtttacgtatcactcagccacgatccagggcataaaaaaagcgcgtcgatcaggacgcgctttttagtatttacttcatattacttcaggtattcacccgtacgcagagcttcaattcgtttatccagcggcgggtgggtcatgaacaactcactgaggcttttgctcttaccgttaatgcagagagccatcatgctggttgcttcttgcggttcatagctggttttcaggcgctgcagcgcggcaatcattttctcgcgaccaaccagttttgcgctaccggcatcagcatggaattcacgatgacggctgaaccacatggtgataatgctcgccagaataccaaacaccagttccagaaccgttgcaaccgcaaagtagatcagcgggttgccgttgctctcttcaccttcatcacgatttccgcccataaaacccgcggcaagctgcgccagaatacgggaaataaagataacgaaggtgttcaccacgccctgaatcagcgtcatggtgaccatatcaccattggcgatgtggctgatttcgtgagcaattaccgcctcggcttcatccgggctcatgttctgcagcaaaccggtgctgacagcaaccagagaggcatcacggcgcgcaccggttgcaaaagcgttgatgtccggcgcatggtagatagccacttgcggcatagcgatccccgcctgacgagcctgggttgctacagtattgaccagccaacgttccctttcgttacgcggttgctcgatcacttccccgccaacagatcgtaatgccatccatttggacatcagaaggctaacgaaggaaccaccaaaaccgaacagcaaggccatgatcatcagcccctgaacgctgctgctctgtatccctgtcaggctcagtaccagcccgaaaacgaccattacggccaggttcgttagcaggaagagcgcgattcgcatcataattttctttttacctcagtttaacaaaacgcaatatgcgatacccacatcgtatgggttacgcgactattttcaagtctggatagtgcgtaagtcaccagaaagacacaactttacattttgtagcatctgatttacggcatcttgtcgctgttaaaaaatcaggcacaatttcttgtgcctgattgatattacttgacgggagcgggttgttccgcgggtctggctttttcaagcttcgccagatcgagtgcgatattcaccgtctcatccagataaggatccggctcctggtaatctttcggtagatcatccagtttcttcaactccggtttaccttcgcgtttaaagcgttcgttcaaacgcgccagacgcgtcgcatcatcttcattattctctttctcacgcacagcgtaattcagagaaacgatattgcgcttgtccttcatagcgttgaagcgcgcgatatccttcatgatgttctggaactcaggatctttcgcgatacgcgcattatgttccttcagcagctccggttcaaaggccgttaaatctccacttttcacataagtcgcggcatcaatgctatcccacggcagcgcgttatcttcgaatttctcacccgtttccgtttcttcattacccgtcggcatgatgatgtctggcgttacgcctttacgttgcgtactgccgccgttaacgcgatagaatttctggatcgtgtactgcacagaacccagcgctggccattcaggacgtaacatctgatcgtaaatacggttcaaactacggtattgctgaacggtgcctttaccaaacgtcggttcacccacaaccagcgcacgaccgtaatcctgcattgccgcggcaaagatttcactagcgctagcactgaagcggtcaaccagcaccaccagcgggcctttatagaaaacctgtccgtcggtatcgctatcttcacgaaccttgccgttgttatcgcggacctgaacaatgggacccgcaggaataaacagaccggagaggcttacggcttcagttaacgccccaccgccattgctacgcaggtcgatgatgacgctgctgacattctgtttttccagtttctgcagttgcactttgacatcgtctgtcaaacccacatagaagcccggaatatccagcacgccgactttctctttaccgacggtcttcacgctcattttaaccgcgcggtcttcgagacgaatacgttcacgggtcaacgttacagtacgggtcttggtccctttaccagcaggtaaaatttccagacgaactttactgcccttcggccctttaattaaggcaaccacatcatcaagacgccagccaatcacgtcaaccatcggcttgcctgtttgaccaacaccgacaattttgtcaccaacgctgatagctttactcttcgctgccggaccacctgccaccatgctattgataacggtgtagtcatcatccatttgcagcactgcgccaataccttccaggctcaaactcatttcagtgttgaactgttcggtattacgcggggaaagatagttggtatgcgggtcgatttcacgcgcaaacgccgtcattgccaggctgaaaacatcttcgctgttggtttgcgccagacgacgaatggcaaatttgtagcggcgagtcagggtttcacgaatttctttatccgtttttcctgtcagcttcaggcttaactcgtcgaatttgactttactgtcccacagcgcgttcaactcagcctcgtttttcggccagggcgctttgctgcggtcaaggttataagtgtcgttgccggtgaaatccatcggcttttccagtacgctcaaagcgtactggtaacgctcaaaacggcgcttttgcgccagattgtagagatcgtagaaaacgtcgagtttgccactacgcagttcatcgcctaactcggttttctttttcgcgaactgttcaacatcgcttgccagcagcacgttgtggctgtaatcgagcagattcaggtagcggtcaaagattttggcgctaaatgcctgatcgaggtcgaactggcgataatgagaacgggtgaagcggctcgttacgcgctcacttaccgtcgcatgctgcgtctcttcctttaataccggaatttgatcagcacgcgtgatatcttctacagcgaaggtctggcctgctattgcaagcaggccagctaacgcggtaagcctaaaaaacatgttcatgcctggcccggcctccgtttcagaacaccaggtgttctgcgcgcacaatcaaagacataccgctattcagctggacgcggacgccgtctttggtgatttctaatacggtggcatccatcgcgttttgacccgctttcaccttcagggcttgtccgacagtcagagcactaatgtcagaaaccggggtgtgctgttcttcgcgaggtgcttttactgtttttggcgctttctctaccggcttttgcgcacgaggtttacgttcagcgccttctttgcggcgtggcgtagtcggacgtggcttgcgttcgcggcgcggtgcgtcttctttctcaccagcagttgcggcagcttcgcgttttttcgcttgctgttcagcacgctgtgcctgaacacgcgctttcgcttcttcaagctgcttgcgagcatgctctacatgttgctcgtccagctcaccgcatgggttgccgtcaagatcgacacgcgttgcgccgggtttaacaccgtaaagataacgccagctgctagtgtagagacgtaaagcggatcgcaattgcgttttgctcaggttcatttccccagcaacacgatcgaccaaatcctgaaaaataccgattttcagcggacgcgcttcaccttccgcactgaaacagtggggaaaacgttcggccagaaacgcgattacttctttactgctattcaacttaggttgattttccatgaaatttcctgattacaacggacgtagccaacaagcgcaggcatgaacaggcgtcattataatgacgctatcagtaaatgctacgttatccgttgattatcctgcgacgctcgcaaagaattttttgtaatccgtcgttgcaagcactttttcaagctgtgccacaagctgacgtaagccttgctcgtcctcgtctgtaaagcgaccgaagacggtactatcgatgtcgagaacaccaataatctgatttttcaccaccagcggcagaacaatttcagaattactcgccgcatcacaggcaatatgcccgtcaaacacatgaacatcctcgatacgctgcacttgattgcgggcaaccgcagtgccgcacacgccgcgcccgacgggtatccggacacaggcaattttgccctgaaatggtccgagtaccagtgtatcgtcctcaagcaaataaaaacctgcccagtttatgtcagtgagacgctcatataacaacgcactggtgttcgcaagcgttgccagaaaactggtttctcccgccatcagcgcgttaaagtcgcgatttaaatccgcgtaaaattctgttttgttcattatataatcacttggttgtcttacctggatctgccagcctattaaaataagcattaaatgcgttaatgctcaagatcattcccatcatgggttaagattaatgttaattcttattacatttggcacgtcatggctcttaacacaccacaaattacgccgacaaaaaagataacagtgagggcaatcggcgaggaactgccgcgtggtgattaccaacgttgcccgcaatgtgacatgctgtttagcctgcccgagataaattctcatcaaagtgcctattgtccgcgctgtcaggcaaaaattcgtgacgggcgcgactggagcctaacgcgcctggcggcaatggccttcaccatgctgttgcttatgccgtttgcctggggcgaaccgctgttgcatatctggctgttaggcattcgtattgacgccaacgttatgcaaggcatctggcaaatgaccaaacagggcgatgcgataacggggagcatggtctttttctgcgttattggtgccccgctcattctggtgacctccatagcttatttatggtttggtaaccgactgggaatgaatttacgtccggtactgctgatgcttgagcgacttaaagagtgggtaatgctcgatatctacctggtcggcattggcgttgcttctataaaggtacaggattatgcccatatccaggctggtgtcggcttgttctcttttgtggcgttggtgattttaacgacggtgacgttgagtcatcttaatgtcgaagaactgtgggagcgattttatccgcagcgccccgctacgcgtagggacgagaaacttcgtgtctgtcttgggtgccattttaccggctatccagatcagcgtggtcgctgcccgcgttgccatatcccgctacgcctgcgtcgccgtcatagtctgcaaaaatgctgggcggcgctgttagcgagtatcgttttattgttacctgccaacctgttgcctatttctatcatttatctgaacggaggacggcaggaagatacaattctttccggaattatgagcctggcaagtagcaacattgcggttgcaggaatcgtgtttatcgccagtattctggtaccgtttactaaagtgatcgtcatgttcactttactgttgagcattcattttaaatgccagcaaggtttacgcacacgcattctgttactgcggatggtgacctggattggtcgctggagcatgctcgacctgtttgtcatatctttaaccatgagcctgattaatcgcgatcagatcctcgcttttactatgggaccggctgcgttttatttcggcgcagcggtaattttgactattcttgctgtggaatggctggacagccgcttactttgggatgcacatgagagtggaaacgcccgcttcgacgactgaataaccgcttactttgggatgcacatgagtcaggaaacgcccgctagcacgactgaagcgcagattaaaaataaacgccgtatcagtcctttctggctgctgccgttcatcgcgctaatgattgccagttggctgatttgggacagttatcaggaccggggtaataccgtcaccatcgactttatgagcgcggatggtattgttccaggccgtacgcctgttcgttatcagggcgttgaagtcggaacagtgcaggatatcagcctcagcgacgatcttcgtaagattgaagtcaaggtcagcatcaagtccgatatgaaagatgcgctgcgcgaagagactcagttctggctggtgacgccaaaagcaagcttggcaggtgtctccgggctggacgccctcgtcggtgggaactatatcggcatgatgccgggtaaaggtaaagagcaggatcactttgtcgcactcgatacccaaccgaaatatcggctggacaatggcgatctgatgatccacctgcaagcccccgatctcggtagcctgaacagcggtagtttggtctatttccgcaagatcccggtgggaaaagtctacgactatgccatcaatcccaacaagcaaggcgtggtgattgatgtcctgatcgagcggcgttttaccgatctggtgaaaaaaggtagccgtttctggaacgtttccggcgttgatgccaacgtcagtatcagtggcgcgaaggtgaaactggaaagcctggcggcactggttaacggtgcgattgccttcgatagtccagaagagagcaaacctgccgaggcggaagatacctttggtctgtatgaagatctggcccacagccagcgtggcgtaataataaaactggaactgccgagtggggccggattaaccgccgacagcacgccgttaatgtatcaggggctggaagtcggacagctgactaaactggatttaaatcctggtggtaaagtcacaggggaaatgaccgttgatcccagcgtcgttaccctgcttcgtgaaaatacccgcatcgaattacgcaacccgaaattatcccttagcgatgctaatctcagcgccctgctgaccggcaaaaccttcgagctggtgcccggcgatggcgagccacgcaaagagttcgttgttgtgccaggcgaaaaagcactgctgcatgaacctgatgttctgacgctgaccctgaccgcgccggaaagttacggtattgatgcgggtcagccgctcattcttcacggcgtgcaggtaggccaggttatcgatcgtaaactcaccagcaaaggcgtcacctttaccgtcgccatcgagcctcagcatcgcgaactggtaaaaggcgatagcaaatttgtcgtcaacagccgtgtcgatgtgaaggtggggctggatggcgttgagtttctcggtgccagcgccagtgaatggatcaatggcgggatacgtattctgccgggcgataaaggtgagatgaaagccagctatccactgtatgccaatttggaaaaagcgctggagaacagccttagcgatttacccaccacaaccgtgagtttgagtgcagagacgctgccggatgtgcaggcaggaagcgtagtgctgtaccgtaaatttgaagttggtgaagtgattaccgtgcgtccgcgagctaacgcgtttgatatcgatctgcatattaagccggagtatcgcaaccttctgaccagcaatagcgtgttctgggcagaaggcggggcgaaagttcagctgaatggtagtggtctgaccgtacaggcatccccgctctccagagcattaaagggagccattagcttcgacaacctcagcggtgccagcgccagtcagcgtaaaggcgataagcgtattctgtatgcttccgaaacagcggcccgtgcggttggcgggcagattacgcttcacgctttcgatgccggaaaactggcggtcgggatgccaattcgctatctcggtattgatatcgggcaaatccagacgctggatctgattaccgcacgcaatgaagtacaggcaaaggcggtactttacccggaatatgtccagacctttgctcgcggtggtacgcgcttcagtgtggtcacaccgcaaattagcgcagctggcgttgagcatcttgatactatcctccagccgtatatcaacgtcgaaccaggccggggcaatcctcgccgcgactttgaattacaagaggccaccattactgatagccgttacctggatggcttaagcattattgttgaagcgccggaagccggtagcttaggcatcggtacgcctgtgctgttccgtggtctggaagtcggtacggttacaggaatgacgctggggacattgagtgatcgcgtgatgattgcgatgcgcatcagtaaacgctatcaacacctggtgcgtaacaattccgtcttctggttggcaagcggttacagtctggactttggtctgacgggcggcgtagtgaaaaccggcacctttaaccagtttatccgtggcggcatcgccttcgccacgcctccgggtacgccactggcaccgaaagcccaggaaggcaaacacttcctgttgcaggaaagtgaaccgaaagagtggcgtgaatggggaactgcgcttcccaaataatgcccactgctccggcgtgcctgcgccggagcgtttatgctaaactgcgcgcctgtttttttgccagtggtacatgctcgtggcccaacacaccgtttatttcccggacgcctttctgacacaaatgcgcgaagcgatgcctagcacgctcagttttgatgattttcttgccgcctgtcagcgcccgttgcgccgcagcattcgcgttaatacgctgaaaatctccgttgctgatttcctgcaattaaccgctccttatggctggacgcttacgccaattccgtggtgtgaagaaggtttctggattgaacgcgacaatgaagatgcattgccattgggtagtaccgccgagcatttaagtggcctgttttatattcaggaagccagtagtatgttgcctgttgccgccttgtttgctgacggtaatgcaccacagcgggtgatggatgtcgctgccgcgcctggctccaaaacgacgcaaatttccgcgcggatgaataacgaaggggcaatccttgccaatgagttttccgccagtcgggtaaaagtgttacatgccaatatcagccgctgtggtatcagtaatgttgcgctcacacattttgatggccgcgtgtttggtgcggcagtgccagaaatgttcgatgccattttgctggacgctccctgctctggcgaaggcgtggtgcgtaaagatcccgatgcgctaaaaaactggagtccagaaagcaatcaggaaatcgcagctacacaacgggagcttatcgacagcgcctttcatgcattacgtcctggtggtacgctggtttacagcacctgtaccttaaaccaggaagaaaacgaagccgtttgcctgtggctgaaagagacttaccccgacgcagtagagtttttaccacttggcgatctcttccctggtgcaaacaaagcgctgaccgaagaaggctttttgcatgttttcccacaaatttacgactgcgaaggcttcttcgttgctcgtctgcgtaaaactcaggcgattcccgccttacccgcccccaaatacaaagtcggtaattttccgttcagcccggtgaaagatcgcgaagctggacaaattcgtcaggcggctacaggtgttggcttaaactgggatgaaaacctgcgcctctggcagcgtgacaaagaactgtggttgttcccggtgggcattgaagccctgatcggtaaagtccgattttctcggttggggattaaacttgccgagacgcacaacaaaggttatcgctggcagcatgaagcggttattgctcttgccagtcccgataatatgaatgcattcgagctgacaccgcaggaagcggaggagtggtatcgcgggcgcgatgtttacccgcaagccgcgccagtggcggatgatgtattggttactttccagcatcaaccgattggtttagccaaacggattggtagccgattgaaaaacagctatccgcgtgaactggtgcgcgatgggaaactttttaccggtaacgcctgacagcgcacaaaaaaagcgcactttttgactggcacattcggctgcctcaactaggctgaaaaatggtgcgatcggactggtcgtaccacaatcggcagctaaatggagagcacgaagatgaaaaccagtgtgcgcataggcgcttttgaaatcgacgacggcgaattacacggtgaaagcccaggtgatcgaacgttaaccattccttgtaaatctgaccccgatttatgtatgcaactggatgcctgggatgctgaaaccagtatccctgccctgctaaatggcgaacactctgtcctttaccgtacccgttacgatcaacaatctgatgcctggattatgcgtcttgcctgatccaaaaagaacccgtcggcatggcgggttatttgtcctggttattcccccgttgtaaaatctctcctaaacttaacggtacggcaccacacttcggggatgaaatgttcgcgctggtactttttgtttgctacctggatggcggttgtgaagatattgttgtggatgtctacaacacggaacagcagtgtctttattctatgagcgatcaacggatccgccagggcggttgttttccgattgaggattttatagatggtttctggcgacctgcacaggagtacggtgatttttaattattgcaattgcacaagagtcagttcgcccccaaagacagcaccggtatcaatataatgcaggttgccaatatccacgcgatgtcgcaacggtgtatgaccaaaccagaaatgatcagcacctgtaattccctgccctttttggcgttcacctaatcggctgcggctccacaagacctgatgcaaatcaacgtccttttgccattcataaacatcatctggataatcggcatgagcaataatatgcttgccggtgcgactgtgtacttcaagaataaagggcaaatgctgacatttttccagcgccgttttcgcttgtttctgttgattatctgccagcgcaataaaccagtcgccgccattcatcaaccacaaagacatctgctgggatgccagcgcatccatcgccatctgttcatgattgcctcttaccgcacaaacccaatgttgttccagtaactgcagacaacgtaaactttgcggcccacgatcgataacgtctcccacactgataagtaaatctcgccacggatcaaaacgacaatgccataatttgcggcgcaactgctcaagacaaccgtgtatatcgccagaaagccagatatgtcgccattgatgacccgcaattctctgataaacgggcgcaggctgtttcatcaatattttcctcccgcgctaaagatcacataatcttaacaagaatgttaaaaaacgctggactcagacagtagagtgtgtgttatggttgactataaagtcagcgaaggaaatgcttctggcttttaacagataaaaagagaccgaacacgattcctgtattcggtccagggaaatggctcttgggagagagccgtgcgctaaaagttggcattaatgcaggcttagttgccttgccctttaagaatagatgacgacgccaggttttccagtttgcgtgcaaaatggtcaataaaaagcgtggtggtcatcagctgaaatgttaaaaaccgcccgttctggtgaaagaactgaggcggtttttttattggaaatcaaaaggctattttaggtaattaacagagtttttcagctcgttctataaacggtgccagactcattttttcgccgggattgttaggatcatcaatctgaatcacgctaatgggttgggcattggtcttcccactggcaacttccttttgtgcgatatcgtttaaaggatactgcacgagggtactcggattaataacatacaaagcattacccggtcggcaagtcagcatcacctcttcgcgattaaacgcccatttgtctttacccacttcaaaacgactgacggtaatcacctgcggtgcagccagcgccgctgcagaactggtgagtaacagaaacgccagaatactttttttcatcattttcgtaatccatcaaaaaggttcgagagtcgcaagcaggctgatgatcaccagcactaccgcacctatcgcccattcgagtttagtcatccacacaaaccagggtgccgcacgatcttcatcctgcctcatgcgcggtacaagaacataacgattagccagcgcaatgaccaccataatcatcaccaggatggctttgagcaataagagttggccccagtaagtcgtaagcgtggggggaaatccggtaatcaacaatgcattaagcacgccgcttgccagtacgccgatcaccgcaaaatgcccgcaccaggaaaaacgcatcagcgcctgaatagcctggtgtcgccaacggcctttgatgagttgcatacaccagagcaccggcagtaatcccccaaaccacgccgccgcacaaatcaggtgaatcgcgtgattagtctgatggattttcgctgttaccccttcattcagcgtcgcatgccccactcccgccagcagaataaattgcgcggtagtgagcataaacagcaaacgtggcatattccgcggttgcataagggcgacgatcaacgttacgagggcgagaacaatttgccataaccagatgccaccaaactgcgtttgcaaaacagcctgccaaatgtttgggctaaatacatctgtccatcccgttcccatcaacccgccctgaacggcgagcattgcagtggcactgatcaaactccagacggcagcgtgctgttgtaaacgcagaaaacgcttcgccagcaagcgacgaatcgtcaagggggccagccaggcaccgtacattgcgaagccaaaaaccagcatcaggctggtgaaatggataaatcgcagcgcgatccaggtaaacgccagcatgatttatttcacgctaaaggtgtagtgtcctttcgttttatgcccgtccacgctaacaacatgccagtcaacggtgtaggttccgggtttcaggctatcggccagtggaacaatcagttgcttttggtcctgctcatttcgcttcgccggtaatgttttaatattttcgttttttggccccgtgatttttgcaccactgaatcctgtttcaacaccttcgctgaagtttaaagtgattgcctgcggtgcagctgtcacttgcgcgtttgccgcaggatactgatgcgttaaatgcgcatgtgcccagacggaaggtgtcaccaagctagtggtcaggattgccagcgcgtagcgaagggagcgtgcagtactagccatattatctattcctttttgtaataacttttttacagagcataaccttgtctaatgtctgagtcgaggatcatcaattccggcttgccatcctggctcactcttagtaacttttgcccgcgaatgatgaggagattaagaatgctgaagaatctggctaaactggatcaaacagaaatggataaagtgaatgtcgatttggcggcggccggggtggcatttaaagaacgctacaatatgccggtgatcgctgaagcggttgaacgtgaacagcctgaacatttgcgcagctggtttcgcgagcggcttattgcccaccgtttggctagcgtcaatctgagtcgtttaccttacgagcccaaacttaaataaaacttatacagagttacactttcttacataacgcctgctaaattatgagtattttctaaaccgcactcataatttgcagtcattttgaaaaggaagtcattatgagcttctggaaagttgcagcagcgcaatatgagcctcgtaaaaccagtctcaccgaacaggtagctcatcatctggagtttgtgagggccgccgccaggcaacaatgtcagctgttagtttttccaagcctttctttactggggtgtgattatagccgacgtgcccttcctgccccacccgatctcagtctgttagacccgctttgttatgccgcaacgacctggcgaatgaccatcattgccggccttcccgttgaatataacgatcgctttattcgtggaattgcggtgttcgcaccgtggcgaaaaacgcctgggatctaccatcagagtcatggtgcatgtctgggccgtcgttccagaaccatcacggtggtcgatgaacaaccgcaaggtatggatatggacccgacctgtagtctgtttactacagggcaatgtctgggagaacccgacctgctggcgagcgcccgtcgcttacaattttttagtcatcagtacagcattgccgtgctgatggcaaatgcccgtggtaacagtgcactatgggatgaatatggtcgtctcatcgttcgcgccgatcgtggtagtttattgttagtcggtcagcgtagtagtcagggttggcaaggcgatatcattccattacgctaagctttttcggcctggagcatgccatgttgcgcattatcgatacagaaacctgcggtttgcagggagggatcgttgagattgcctctgttgatgtcattgacggaaaaatcgtcaaccccatgagccacctggtgcgccccgatcgtcctattagtccacaagcgatggcgattcatcgcatcaccgaagccatggtcgccgataaaccgtggattgaagatgtgatcccacactattacggtagtgaatggtatgtcgcgcataacgccagctttgaccgccgcgtactgcctgagatgcccggtgagtggatttgcactatgaaactggcccgtcgtttgtggcctgggatcaagtacagcaatatggcgttatataaaacacgcaagctcaatgtacagacgccgccgggcctgcatcatcaccgcgcgttgtatgactgttatatcaccgccgcgttgcttatcgatattatgaacacctccggctggacggcagaacagatggccgatatcaccggacgtccgagcttgatgacgaccttcacctttggcaaataccgtggcaaagcggtttccgacgttgccgaacgcgatccgggctatctgcgctggttatttaataacctggacagcatgagcccggagctgcgtttaacactgaaacattatctggaaaatacttaatccgcaggcgtagcgggtaatgttccctgcgccagcgcgaccagaaaagcatattccatcgctacgccttcgtagcttttaaagcgaccagatttaccgccatggccactgtccatgtcggtacagagcaataaaagatggtcatcggttttcagctcgcgcaatttagcgacccattttgccggttcccaatattgcacctgagaatcgtgcaaaccggtcgttaccagtaaatgcggataagcctgtgcggtgacgttgtcatacgggctgtagcttttcatgtactcgtaatattgcggatcctgcgggttaccccactcttcaaactcaccagtggtaagaggaatactttcatcaagcatcgttgttacaacatcaacaaacggtacctgggcgataacgccgtggaataattccgggcgttgattaattgcaacgcccatcaacatgccccccgcactcccgcccatcgcataacaaaggctaggagagccatagcccagttttaacaatgcatcgcaggcatcaagataatcattaaacgtatttttcttcttcagaaattttccgtcttcgtaccattgttgccccagctcaccaccgccgcgaacatggacaatggcgtagacaaagccacgatctaacaaactcaagcggctaaaactgaaatcggcatcaatacttgcgccgtaagaaccatagccatacaccagcaacgggttgtgtcctttgcgaaaatgtttgcgatggtagaccaagctaaccggaacttcgacgccatcacgggcgactatccacaggtgttcactgcggtaattcgccgcataaaaaccaggaacttccgtttgttttaatacacgacgctcaccggtatccatatccagttcaaacaaagtgtctggtgtagtcatggaagaataaccataacgcaatcgcgcggtttcaggttctggattgtaggcaatccaggtcacataggccggatcatcaaaggcaataccaatgacttcccgggtcttgcggttaatttggcgcaaactggttaacccgcgctgacgctcttcaaccaccagccagtcggtaaacagcgtaaacccttccagcatgatgttttcgcgtggcggaattaactcttcccactgttgctcatcacgcatacgggtacggtataagccaaagtttttgccgtggcggttggaacgcagataaaaacgatgctggtagtgatcaaggctgtattcgtgatctttgcggcgcggcagaaaaacaaacggctcggcatcggccatttccgcgtccagcaggcgaacttcactggtggtggcgctggccaaatgaatgactacatagtgcttgctggtcgttttatgcaggctgacgtaataggtatcgtctttttcttcgtagatcagtttatcttggcttgctggcgtaccgatggcgtgacgccagacctgataaggcagcagcgtcaccggatgcttgcgaacatagtagaaaatccaggagtcatttgcccagacaaagctgggttcaacgttatccagcagttccgggtaccagttaccagtttccagattacgaaaacgaatgccgtactggcgtcgggaaagaaaatcttctgccagcgccataatggtgttatcgggcgtaatcgccattccgcccatgctataaaactcactatgagctgcgcgcttattggcatcgagcaatgtttcccactcatcccactcttcactgaatgcgctttgacgctggtagatagcatattcacagcctggttcataaatatgccgatagcggtagccatttttgatgtagggcgcagaaacttctcgttgcggaatgcggtcgatgatttcctttaagatgcgatcctgcaaggcttgttgactggccatcacccgatgaccgtaactattttcttgttgcaggtagtccaggacttctggctgagaacgcgtatcgtcccgcagccagtagtaattatcgatgcgcgtatcgccatgaagcgtcatggcgtggggaatgcgggcggcttttggtagcatgttattgttctttctggttgaaacatcttataagggtggcaaaactcaccggggatgcaagcgaaacaggggagtcattgcttagatgatgacaggtaatggcgcggatatcgaatgttatgcagacagagaaaatcagcctgttcaaatggctgtgcgattctggatagcccgaaatagtcaacttcaggctatccagagagcggaattattccgccaaagtgcgtttttgctgttcgagatcgcgttcaatgccgtcacgaacatcctgggggattttcagcgcgtcacccagtgcattcaggtaactgcgttccataaaatggtcaatatcaatagccgcgcaactcaggaaatagatttccagcgcctcttcttcattgcggaccccggtagccaggcgttgtggatccagcggttgttcgattgcctgctcaatgagtacacgcccctgctcttccacgccggctccacgcaattgctggtcgattgccgcacgttctttggcatcaatatgaccatcacttttagcggcaaagaccagcgcaaggatcaaacgtgctgtacgctcatccagcggcgtactttgcgcgccaaactgcggttcgtcctgatgcgccgcgcgaattttatctttgtatttattccacagcaccgtacccgctaccgctccgccgccaaccagtaacgcgttggtgccatatttcgtaagaagtttacgtgcacttttatttgcgaccagcagcccagccagtccgcctaatgcgcctggcactaacagtttgaccaatccctgatccgcagagctggaggtagaagaactgctttgcccaagcagggattgcagttgatttaaccagttagccatatttgctcctcaataaccatttttagtgcctgtagcatagcggatgaggatgtcagaaaatgtatatcgagacaaaagatgcgcaaataagcggggcggtaggccgttattcaaagaaattcgcgccaggtaaggtatttactgtatatcaggtgataagggtattttaggtgaaagtagtttgtcgttttgagtggcattgtttgatgctgattgcccgatgcgacgctgttgcgtcttctcaggcctacgattgtggtgcgttctggggcggacaaggcactcgcgccgcatccgccaacagtcaatcgaattatcagaagccattaacgccgctgatattccgccattcccgctttgcagtccacgctgacctggtaatgaatatcggcacttttaccacgcacggttagcggtacactccatttatcatctttaccctgaatgtcctgcaaactgacccaagccacgggatcggcctgaccgacaattttttgatcatctgcccaacgcgccacgcgattttgttgataatcacgttttacgctcgcggcaattccggcagcatccagatcttcacactttgggaaagtgacgctcttgctggtttcattattggcagcgaaaacacttgcgcaggcagaaaccaacaacagccctaaaaacgcccctctttttttcatgtttttctccatagcacaatgattcaggagaaagcatggtacaaattgtcaggagcgcaagttgcttcaggccgcgtgactggcatcttcctcttcggattcagcaccgacgacctgtggggacggtaatttgccggttttcagaatggtgctcagcacatctttttgttctgccagccataggctaagggcttcacgttgctcgtcttccatttgcactggagaatttgtcagccaggtgtcaagcagatccgccgtatcaagcattttgtcataagcatcggcttcctttttgctggtaaagctcattttctcttcgccctcacgaatgactacgtatttaacttcaaccgccatttgcagcctctcataataactgtgattttatacagtatatttcttttcggttgagaaatcaacatcagcaataaagacacacgcaaacgttttcgtttatactgcgcgcggaattaatcaggggatattcgttatgacgttattaggcactgcgctgcgtccggcagcaactcgcgtgatgttattaggctccggtgaactgggtaaagaagtggcaatcgagtgtcagcgtctcggcgtagaggtgattgccgtcgatcgctatgccgacgcaccagccatgcatgtcgcgcatcgctcccatgtcattaatatgcttgatggtgatgcattacgccgtgtggttgaactggaaaaaccacattatatcgtgccggagatcgaagctattgccaccgatatgctgatccaacttgaagaggaaggactgaatgttgtcccctgcgctcgcgcaacgaaattaacgatgaatcgcgagggtatccgtcgcctggcggcagaagagctgcagctgcccacttccacttatcgttttgccgatagcgaaagccttttccgcgaggcggttgctgacattggctatccctgcattgtaaaaccggtgatgagctcttccggcaaggggcagacgtttattcgttctgcagagcaacttgctcaggcatggaagtacgctcagcaaggcggtcgcgccggagcgggccgcgtaattgttgaaggcgtcgttaagtttgacttcgaaattaccctgctaaccgtcagcgcggtggatggcgtccatttctgtgcaccagtaggtcatcgccaggaagatggcgactaccgtgaatcctggcaaccacagcaaatgagcccgcttgcccttgaacgtgcgcaggagattgcccgtaaagtggtgctggcactgggcggttatgggttgtttggtgtcgagctatttgtctgtggtgatgaggtgattttcagtgaggtctcccctcgtccacatgataccgggatggtgacgttaatttctcaagatctcagtgagtttgccctgcatgtacgtgccttcctcggacttccggttggcgggatccgtcagtatggtcctgcagcttctgccgttattctgccacaactgaccagtcagaatgtcacgtttgataatgtgcagaatgccgtaggcgcagatttgcagattcgtttatttggtaagccggaaattgatggcagccgtcgtctgggggtggcactggctactgcagagagtgttgttgacgccattgaacgcgcgaagcacgccgccggacaggtaaaagtacagggttaaacccggcaaaaaaacgctacaaaaatgcccgatcctcgatcgggcattttgacttttacagcttagcgccttctacagcttcacgcgccagcttagtaatgcggtcgtaatcgcccgcttccagcgcatctgccggaaccagccaggaaccaccgatgcacagcacgcttttcagcgccaggtagtcacggtagttagccggagaaataccacccgtcgggcagaaacggacctgggagaacggacccgcgatcgcctgcagggctttcacgccgccgttagcttcagccgggaagaatttgaactctttcaaaccgtagtccatacccagcatcagttcggaaacagtgctgatccccggaatcagaggaatagtcccttcggtagcagctttcagcagcggctcggtcagacccgggctaattgcgaactgtgcacccgcttcagtgacttctgccagctgctgtggattcagcaccgtaccggcacccacaatcgcttcaggcacttctttggcgatagcacggatagcgtcaactgcacactcggtacgcagagtcacttccagaacgcgcaccccaccagcaaccaacgcttttgccatcggcaccgcgtgttccagtttttttaccacgataaccggtacaaccgggccggtggtcaggatactttctgcacttgttttccagtttttcatcagagttttctctcgcctgattacaaatttgtcgtcttaaaaagtgatacaggttgcgccctgttcggcaccggacagtttttcacgcaaggcgctgaataattcacgtcctgttcccacgcgactcgcgctcaggtcaggaatgtgcggttcgcgagcagccagttccgcttcgtctaccagcagcgtcagttcgcctgtctgtccattcacacgaatgatgtccccgtcgcgcacttttgccagcagcccgccatcgtaggcttctggtgttacgtggatagcactcggcactttaccactagcgccggagagtcgtccatcggtaactaacgcaattttgaaacaccggtccaataatacaccaagtggcggcatgagtttatgtaattctggcattccgttcgcttttggcccctgatgacggacaacaacgacacaatcgcggtccagcaaacccgcttcaaaggccggcataacgtcatgctggctttcaaaaacaaccgctggcgcttcaatcacctggttctcaaccggcacggcagaggttttcataaccgcacggcccaggttaccgcttaacacttttgtcccaccatgatgagagaaaggttgttcgaaggaagcgatcacattgctgtcgagacttttttccgccccttcccgccagtccagttcaccattattcagccatggttcaagggtataacgagacagaccaaaacctgccaccgtattgacatcttcatgcagcaggcctgctttgagcagttcacgcaccagaaccggtacgccacctgccgcctggaagtggttaatatcggccggaccgttcgggtagagacgtgccatcagcggtacaacatcagaaaggtcagagaagtcatcccagttaatctgaataccggccgcgcgcgccatcgccaccaggtgcatggtgtggttagtggaaccaccggtcgccagcagtgcaacgataccgttcaccaccactttctcatcgatcatcttaccgatcggcatccattcattaccattaccggtcatgcgtgtaacctgacgcgcagctgcggcggtcaaagcatcgcgcagcggagaatccggatgaacaaaagaagagcctggcaactgcatccccataaactccaccaccatctggttggtgttggcagtaccgtagaaagtacatgttcccggcgcatggtaagacgcggcttcactctccagtaaggccatgcggtccactttaccttcggcataaagctggcgaatacgcactttttctttatttggcaaaccgcttgccatcggtccagacggcacaaacaccgcaggcaaatgaccaaagctcagggctgccatcgtcagacccgggacaatcttgtcgcacacaccgaggaacagagcaccatcaaacatgttatgggacagccccaccgccgcagacatcgctatcacttcgcggcttagcaggctcaattccattccatcctgcccctgggtgacaccatcacacatcgccggaacaccgcccgcaacctgaccaaccgcattcgcttcatgcagggctttacgaatgatttctggatagtgttcataaggctggtgcgcggagagcatgtcgttataggaggtgatgatggcgatattgttacgcaacatgcttttcaaagaggctttgtcttctggctggcaggcagcgaaaccgtgtgccaggttaccgcatgccaactggctacgatgaacggtgctagttttcgcttgttctatccgggcgagataagcagagcgagtctcgcggctacgttcaatgattcgatttgttacgcgtaacaattgtggattcataaaggctcctgaaattgagttgtcagagcaggatgattcacaacgcgtttcattcagaggatttatgactgaaacgcctgtaaccggagctcatagggcaaaaacgtttcagtcagtgtaataaaaaaagcctcgtgggtgaatccgcacgaggcctgaaagtgtaaaaattgttctacaatctgcgcaagatcatgttaccggtaaaataaccataaaggataagcgcagatattactcaaactcattccaggaacgaccatcacgggtaatcatcgccacgctggcaacgggtccccaggttccggcctgatacggtttcggcgcatcattgtccatcgcccacgcctcagtaatggagtctacccatttccaggcttcttccacttcgtcgcgacgtacaaacagtgcctgaataccacgcatggtttccagcagcaaacgttcataggcatccgccagatgcgtctgattaaaggtttcactatagctcagatccagcttggtgatttgcaggttatgtttgtggtcaaggccaggaactttattcagtacctggatatccacgccttcatcaggttgcagacggatagtcagtttattctgcggcagatcctgccagctttctttaaacagattcagttcaggtgttttgaaatagaccacgacttcagaacatttggtcggcagacgtttaccagtacgcaggtagaatggcacaccggcccagcgccagttatcaatgtcgacgcggatcgccacgaaagtttctgtattgctgctcttgttcgcgccctcttcttccagatatcccggcacttttttgccctgggcgaagcccgcagtatattgcccgcgtacggttttttcgcgtacgttggagcggtcgatgcggcgcagagacttcagtactttcactttttcatcgcggatgctgtctgcgctcaggtcagacggcggagacatcgcaatcatgcaaagaatttgcagcaggtggttctggatcatgtcgcgcatctgaccggctttatcaaaatagccccagcgcccttcgatccccacttcttctgccacggtaatctcaacatgatcaatggtgcgattgtcccagttattcacaaacagggagttagcaaaacgcagcgccaacaggttcagcaccgtttctttaccaagatagtggtcgatacggtaaacctggcactcctcgaagtattcgccaacctgatcattgatttcctggctggtcgccaggctcgtccccagcggtttctccatgactacgcgtgccggtttagcattcagttttgcctcgccaagccctttgcaaattgcgccaaaagtgctgggcggcatggcaaagtagttaatggtgatacgatttttttgatccagcatcgcgccgagacggctgaatgcagcagtgtcattgacatcgagattacaaaaatccagacgtgcactcagggtgtcccataaaccttcatcaatggtttctttcatgaaagtttcgagcgcctcgcggacaactttggtatatgccgctttatcccagtcagcacgccctacgccgataatccgggtgtccgggttgagctgaccggctttttccagttgatacagggaaggcagcaatttacgacgcgcaaggtcgcctttcgcgccgaaaatgaccaggtcacaggcctgggctgtttgcgttaccgccatgtcattctccttaagttaactaacccggtacttaagccagggtatacttgtaattttcttacggtgcactgtactgcttttacgagcttgcgaaaactgtaaacgcttatccacccgtgcgattacgggaaaagcgcgcaaagtgcggcaaaactgataaaaaaatcatcgttttccattgggtaaaaatctgacactgatcatgttatgaaaaaaaataacaacttttttatctgcttttgtcattaacacggcacacaggcgtaatatctgacaaaactgcatttcgatttctttcagtgcggaaatcgtcattacccgtgagtctctttacatcatgaatatgctggaaaaaatccagtctcagctggaacatttgagcaaaagtgagcgcaaagttgccgaggtcattctggctagccccgataacgcgatccatagcagtattgctgctatggcactggaagccaatgttagcgaaccgacggtgaatcgtttctgtcgcagcatggacacgcgcggttttcctgattttaaacttcatctggcacagagtctggcgaatggcactccctatgttaatcgcaatgtcaatgaagatgacagcgttgaaagttacacagggaaaatatttgagtccgcaatggcaacgcttgatcatgtccgtcatagtctggataaatctgccatcaaccgcgccgtcgacttgctcactcaggcaaaaaaaatcgcctttttcggattaggctctagtgccgccgttgcccacgatgcgatgaataagttctttcgttttaatgttccggtggtgtactccgatgatatcgtgctgcaacgcatgagttgtatgaattgtagcgacggagacgtggtggtgctgatttctcacactggaagaacaaaaaatctggtcgagctggcgcagctggcacgcgaaaacgacgccatggtgattgccctcacctctgcgggtaccccgctcgcccgggaagcaacgctggcaattaccctcgacgtaccggaagatactgacatttatatgcccatggtttctcgacttgcacagctgaccgtgatagatgtgctggcgacaggatttactttgcgacgcggtgcaaaattcagagataacttgaagcgggtcaaagaagcgctgaaggaaagccgttttgataagcagttacttaatttaagtgacgatcgctaaaaacgactgtcactgtcctaatcttatacgacatccgaatgagattaatttatcgccatcgcggcgttatttcattcggatttcatgttcaagcaacacctggttgtttcagtcaacggagtattacatgtccagaaggcttcgcagaacaaaaatcgttaccacgttaggcccagcaacagatcgcgataataatcttgaaaaagttatcgcggcgggtgccaacgttgtacgtatgaacttttctcacggcagccctgaagatcacaaaatgcgcgcggataaagttcgtgagattgccgcaaaactggggcgtcatgtggctattctgggtgacctccaggggcccaaaatccgtgtatccacctttaaagaaggcaaagttttcctcaatattggggataaattcctgctcgacgccaacctgggtaaaggtgaaggcgacaaagaaaaagtcggtatcgactacaaaggcctgcctgctgacgtcgtgcctggtgacatcctgctgctggacgatggtcgcgtccagttaaaagtactggaagttcagggcatgaaagtgttcaccgaagtcaccgtcggtggtcccctctccaacaataaaggtatcaacaaacttggcggcggtttgagcgctgaagcgctgaccgaaaaagacaaagcagacattaagactgcggcgttgattggcgtagattacctggctgtctccttcccacgctgtggcgaagatctgaactatgcccgtcgcctggcacgcgatgcaggatgtgatgcgaaaattgttgccaaggttgaacgtgcggaagccgtttgcagccaggatgcaatggatgacatcatcctcgcctctgacgtggtaatggttgcacgtggcgacctcggtgtggaaattggcgacccggaactggtcggcattcagaaagcgttgatccgtcgtgcgcgtcagctaaaccgagcggtaatcacggcgacccagatgatggagagtatgattactaacccgatgccgacgcgtgcagaagtcatggacgtagcaaacgccgttctggatggtactgacgctgtgatgctgtctgcagaaactgccgctgggcagtatccgagtgaaaccgttgcagccatggcgcgcgtttgcctgggtgcggaaaaaatcccgagcatcaacgtttctaaacaccgtctggacgttcagttcgacaatgtggaagaagctattgccatgagtgcaatgtacgcagctaaccacctgaaaggcgttacggcgatcatcaccatgaccgaaagcggtcgtaccgcgctgatgacctcccgtatcagctctggtctgccaattttcgccatgagccgccatgaacgtacgctgaacctgactgctctctatcgtggcgttacgccggtgcactttgatagcgctaatgacggcgtagcagctgccagcgaagcggttaatctgctgcgcgataaaggttacttgatgtctggtgacctggtgattgtcacccagggcgacgtgatgagtaccgtgggttctactaataccacgcgtattttaacggtagagtaagtacgttgccggatgcggcgaaaacgccacatccggcctacagttcaatgatagttcaacagatttcgaatattctgaagcaaacttgaacttatcatcaggcgaaggcctctcctcgcgagaggcttttttatttgatgggataaagatctttgcgcttatacggctggatttcgcccggtttgcgagttttcagcaattttagtatccaggtgtattgttctggtcgcggaccaacaaaaatctcgacttcttcattcatccgccgcgcaatcgtatgatcatccgcctctaacagatcatccatcggtgggcgcacctgaatcgtcagacgatgcgtcttgccatcataaatcggaaacagcggtacaacgcgcgcacggcacactttcatcaaacgaccaatcgcgggcaacgtcgctttataggtggcaaagaaatccacaaattcgctgtgctctgggccatgatcctgatcgggtaaataatatccccagtacccctgacgtacgctctggatgaatggtttaataccgtcatttctcgcatgcagacgaccgccaaagcgacgacgcaccgtgttccagacataatcaaaaaccgggttgccctgattatggaacatcgctgccattttctgcccttggctggccatcagcatggcaggaatatcgacggcccaaccgtgcggcaccagaaagataactttctcgttattacgccgcatctcttcgatgatctccagcccttgccagtcaacgcgcggctgaattttctccggcccgcgtattgccaactcagccatcattgccatcgcttgcggcgcggtggcaaacatctcatcaacaatcgcttcgcgttcagcttcactacgttctggaaagcagaggctcagattgattaacgcacgacggcgactgctttttcccagtcgtccggcaaaacgtcccagccgtgccagaatgggatcacggaactttggcggcgttaaagcgatacccgccatcgctgctacgcccagccatgctccccagtagcgcgggtggcgaaaggatttatcaaactcaggaatgtattcgctattattttttttcgtttccatgcttttccagtttcggataaggcaaaaatcaatctggtgatagtgtagcggcgcaacttgccccgcaccaaataaaaaaagccggtactgactgcgtaccggctgcgaatggatgttaattaatcaaaccgtagctgcggcacaatctctttggcctgcgccaggaattcgcgacgatcggagccggtcagcccttcggtacgcggcagttttgccgtcagcgggtttacggcctgctggtttatccatacttcatagtgcagatgcggcccggtactacgtccggtattaccggaaagcgcgatacggtcgccacgtttcaccttctgtcccggtttcaccagaatcttgcgcaagtgcatataacgcgtggtgtagctgcgaccatgacgaatagccacataataacctgctgcgccactgcgtttggcaaccaccacttcaccgtcacccacactaagcactggcgtaccctgcggcatggcgaaatcaacacctctgtgtggtgcaacgcgaccggtcaccggattagtacgacgcgggttaaaattagagctgatacggaactgtttcgccgtcgggaatcgcaagaatcctttcgccagaccagtaccgttacgatcgtagaatttgccatcttcagcgcggatagcgtaataatctttaccttcactacgcaaacgtacgcccagcagctggctttgctcacgtttaccatcaagcatttctcgagacattaacaccgcaaattcatcgccttttttcagtttgcggaaatccatttgccactgcatggctttaatcactgcgctcacttcggcgctggttaaaccggcgtttctggcgctggcaacaaagcttcccccgacggtacctttcagcagattgttaacccactctccttgctgcatttcgctggtcattttaaaaccgttagcggcagtacggtcataggttcgggtttcacgacgagacacttcccaggtgaggcgctgcagttcgccgtccgcggttaatgtccaggagagttgttgaccgattttcaggttacgcaattctttgtcggccgcagccagttgggtgatatcacccatatcaataccatactgattgagaatgctgcttagcgtatcgccagtggaaacaacatattcatgcacgcccgcttcaccggcgattttgtcatccagttcgtcctggggaatggcttcatcttcttgtgcagcttgatcaatcggctcactggcttcaggtaagaggctacgaatttcgttctgttccagctcaatggttttgacaattggcgtggcatcacggtgataaacataaggccgccagacagcgacggccagagtaagaacggtgaggctccccaacataacgcggtgtggtcgcggtaaattattaaacgccagggcgacagagcgggctatctgttgcacgtaatcacttcctcattaatctcctttcaggcagctcgcatactggttggctaattgactcaggaattcactatagcttgttttacccagtttgatattcgtccccaggggatccaacgttcccatacgaacggatgtccctcgtgcgacgctctcaacgaccgctggcctgaactgtggctcagcaaaaacgcaggttgctttttgctcaaccaactgtgttcttatttcatgtaaacgctgcgcgccaggttgaatctcagggttaacggtaaaatgaccaagcggtgtcagtccaaactgtttttcgaaatagccgtaagcatcgtgaaaaacgaaataacctttccccttgagcggcgcgagctcgttaccaacctgcgtttcggtactggctaattgtgcctcaaaatccttcaggttggcgtcaagtttggctcgactttgcggcataagttccactaattttccatggattgcaaccgctgtagcccgcgctatctctggggaaagccaaagatgcatgttgaaatcgccgtgatggtgatcttcgtcacttttttccgcgtggtcgtgatcatcatcatcgccgtgaatacttttcatcagtagcggtttcacatcttcaagctgcgcaatcgttacctgcttcgctcctggtaatttgcttaccggtttttgcataaacgcttccatctccgggccaacccaaacgactaagtccgcgttctgtaagcgttttacatcgcttgggcgcagactataatcatgttcactagcgccgtcaggaagtaaaacctctgtttctgttaccccatcagcaatggcagaagcgatgaacccaacgggtttaaggctagcgacaacggcggcatctgcggcctgtgttgcacctccccagagagcggcggataatgctgcgaaaagaagcgtttttttatgtaacataatgcgaccaataatcgtaatgaatatgagaagtgtgatattataacatttcatgactactgcaagactaaaattaacatgacaagtctggtttccctggaaaatgtcagcgtttcttttggccaacgccgcgtcctctctgatgtgagcctggaacttaaacctggaaaaattttgactttacttgggccaaatggcgcaggtaagagcacactggtacgggtagtgctcgggctggtaacacccgatgaaggggttatcaagcgcaacggaaaactgcgcatcggctatgtaccgcagaagctgtatctcgacaccacgttgccactgaccgtaaaccgttttttacgcttacgccctggtacacataaagaagatattttgcctgcactgaaacgtgtccaggccgggcacctgattaacgcaccgatgcaaaagctctctggtggcgaaacgcagcgtgtactattagcgcgagcattgttaaatcgcccgcaattattagtgctggatgaacccactcaaggcgtggatgtaaatggccaggtggcgttatatgaccttattgaccaactgcgtcgtgaactggattgtggcgttttaatggtttctcacgatctgcatctggtgatggcaaaaaccgatgaagtgctgtgcctgaatcaccacatttgttgttccggcacaccggaagttgtttccctgcatccggagtttattagtatgtttggtcctcgtggtgctgaacaactgggtatctatcgccatcatcataaccatcgtcacgatttacagggacgaattgttttgcgtcggggaaatgatcgcagttgatttaacgtcggggaaatgatcgctcatgattgaattattatttcccggttggttagccgggatcatgctcgcctgtgccgcgggtccgctgggtagctttgtagtctggcgtcgtatgtcttatttcggtgatacgctggctcatgccagtttacttggcgtcgcgtttggtttgttgctggacgtgaatccattctatgcggtgattgccgttacgctgctgctggcgggcggtctggtatggctggagaagcgtccacagctggcgatcgacacgttattagggattatggcgcacagtgccctgagcctgggcctggtggtcgtgagtctgatgtctaatattcgtgttgatttgatggcttacctgttcggtgatttgctggcagtgacgccagaagatctcatctctattgcgattggcgtggtcatcgtggtggctattttgttctggcaatggcgcaatttgctgagtatgacgataagcccggatctggcgtttgttgatggtgtgaaattacagcgagtgaaattgttgttgatgctggtgacggcattgacgattggtgtagcgatgaaatttgtcggtgcgttgattattactagcttgctgattattcctgctactactgcgcgtcgctttgcccgcacgccggaacagatggctggtgtcgctgttttggtggggatggtggcagtgactggcggtttaaccttttccgcggtttacgatacgccggcgggtccgagcgtggtgctatgtgcggcactgttatttattctcagtatgatgaaaaagcaggccagctaatctatcgctgaacacatttgtcggatgcggcgcgagcgccttatccgacctacggttcggtatctctggtagtcctggtaagacgcgaacagcgtcgcatcaggcatattgccagtgccggatgcggcgcgagcgaccaatccgacttacggcatttctggcggcgttatgccaaagtgattccacgcccgcgtcgtcgccatacgcccacgcggtgtacgctgcaaaaagccttgctgaatcaaataaggttccagcacatcctcaatggtttcacgttcttcgccaatggctgccgccaggttatccagacctacaggtccaccaaagaacttatcgattaccgccagcaacaatttgcggtccatataatcgaaaccttcagcatcgacattcaacatatccagcgcctgagcagcgatatctgcgctgatggtgccatcgtgcttcacttcggcgaaatcacgcactcgacgcagcagacggttggcaatgcgcggcgtaccgcgagcgcgacgagcaacttccagcgcgccgtcatcactcatctcaagccccataaagcgtgcgctgcgactgacgatatattgcagatccggcacctgataaaactccagacgttgcacaataccaaaacggtcgcgcaacggacttgtcaggctacctgcgcgcgtggttgcaccaatcagggtaaacggcggcaaatcaattttaatggagcgtgccgccggaccttcaccaatcatgatatccagttggtagtcttccattgccgggtacagcacttcttcaacaactgggcttagacggtggatctcatcaataaacagcacgtcatgcggttcaaggttagtgagcatcgcagccaaatcgcccgccttttccagcaccggaccagaagtcgtgcgtaaattaacgcccatttcattggcgacaatgttggcaagcgtagttttacccaaccccggaggaccaaaaatcaacaaatgatcgagggcatcgccgcgcagtttcgctgctttgatgaaaatctccatctgactacgaacctgcggctgaccaacatactcttccagtaatttggggcgaatggcgcgatctgctacatcttccggcaaagtggtaccggcagaaatcagacggtctgcttcaatcatcctttacctcataacgcggcgcgtagggcttcgcgaattaaagtttcactgctggcgtcagggcgagcgattttgctcaccatgcggcttgcttcttgtggtttatagcccagcgccaccagcgcggcaaccgcttcttgttcagcatcgtcggtcgccgggctggcaggagacgtgagtaccaggtcggcggctggcgtaaagagatcgccatgcaaacctttaaatcggtctttcatttcaacaatcaagcgttcggcggtttttttgccaatacccggcagtttcaccagtgcccccacttcttcacgctcaacggcattaacgaactgctgcgcactcattccggagaggatcgccagcgccaacttcgggccgacgccgttggttttgatcaactctttgaacaatgtgcgctcttgtttattgttaaaaccgtacagcagttgcgcgtcttcacgcaccacaaagtgggtgaaaacgatcgcttcctgacccgcttcagggagttcataaaaacaggtcatcggcatatgcacttcatagcctacgccgcccacttcaattaacaccagcgggggttgtttttcaatgatgatgcctctgagtctgcctatcacatgacgctcctgcgtaatgaatcaaagataatgctgtatgataaaaaaatgctggatagatatccagcgaaggatgaagaaaacttgcgaggtgtctcgatgaactgaaaaatggcacagtataatttattctacaggttatattggaagcaaatattttaatattacatattcagtgaagaaatgcgtaataaaaatatacattgcgcctcctgaaaaaataaattttttatgctattacgtatatttgtatctatttcaatggaatgacaacgtgaatattaattaccctgctgaatatgaaattggagatatcgtctttacatgtataggtgctgccttatttggtcaaataagtgctgcaagtaattgctggagtaatcacgtcgggatcattatcggtcataacggtgaagacttcctggttgcagaaagccgggttccccttagtaccatcaccacgctatctcgttttattaaacgtagctctaatcaacgctatgctataaagcgattagacgctgggctgacagaacgacaaaaacaacgaattgttgaacaggttccctcccggctacgcaaactttaccacaccggttttaaatacgaatctagccgccagttctgtagtaaatttgtttttgatatttataaagaagcgctatgtattccggtgggtgaaatagagacgtttggagaattgttaaatagcaatccgaatgcaaaactcactttctggaaattctggttcctgggttctattccgtgggagcgtaaaaccgtcacgccagccagtttgtggcatcatccgggtttggtgttgattcatgcggagggagtggaaacgcctcagccggaactgaccgaggcggtataacttaacgcagtcgccctctcgccaggttcagccggctttcgctcatctgcatcgcattctgactaacgtggcagtgggtgatagcaatcgccagcgcatcggcggcatccgcctgtggattagcgggcagtttcagcaaggtgcggaccatatgctgcacctggcttttttcggcactgccaatacctaccaccgtttgctttacctgacgtgccgcgtattcaaatactggcaactcctgattcaccgccgccacaatcgccacgccgcgcgcctggcccagtttcagggcactgtcagcgttctttgccataaagacttgttcaatggcgaaataatcaggctggaactgggtgatgatttccgtcacgcccgcatagatgagtttcagacgagacggtaaatcatccactttggtgtggatgcatccgctacccaggtaggacagttgcctacctacctggcggatgacgccgtagccggtcacgcggctacccggatcaatgccgagaataatagccatcacgcgtctccgttttgctgtttagcaggcctcatcagagagtcgctgcgacctcatcagagatttcaccgttatggtaaacttcctgcacgtcgtcgcaatcttccagcatatcgatcagacgcatcagtttcggtgcggtttctgcatccatatcagctttggtagacgggatcatggaaacttccgcgctgtctgctttcagacctgccgcttccagagcgtcgcgcactttacccatttcttcccatgcagtgtagacatcaatcgcgccgtcatcataggtcacaacgtcttcagcacctgcttccagtgctgcttccatgatggtgtcttcatcgcctttctcgaaggagatcacgccttttttgctgaacagataggcaacggaaccatcagtaccgaggttaccgccacatttgctaaatgcatgacgcacttcagcaacggtacggttgcggttgtcagacagacattcaatcatgattgccgtgccgccaggaccgtaaccttcgtagatgatggtttccatgtttgcatcatcatcaccgcccacaccacgtgcaattgcgcggttcagtgtgtcacgggtcatgttgttagacagtgctttatccaccgccgcacgcagacgcgggttagcgtccggatcgccaccgcccagcttagccgcggttaccagctcacgaatgattttagtgaagattttaccgcgcttagcatcctgcgcagctttacgatgtctggtgttggcccatttactatgacctgccataaaaatatctccagatagccctgcctgttcaggcagcgttaattacaaactgttcaatcgcctgccggttgctccaggacttagtgagcgccgccgcagcaggcgcatcaagccacttgtaagccagatgttcagtgaaaacgatctgccgctcgtgcggaagcgcaagacagaaccaactttccgtattacgcgtcacgcccggcgcatagcgatgacgtaaatgactaaaaatttcaaactctaccgtgcgctgacagtcaattaaggtcagttgttcagcgacaacatcaatggtgacctcttcctttacttcgcgcatggcagcttgcggcgcggtttcaccctcttccacgctgccggttacgctctgccagaaatcgggatcgtcacgccgctgcaacatcagcacccgtttcgtatcttgtgcgtagatgaccactaagatgctaacgggacgcttatacactttatccttcacgctgcctcttcgttgactgccttcgctcatcccattcacatagttatctatgctcatgggagttcactcagttgccgcctcgatgcaacgcgaatgatttcgtgtatttgagtcatatcagttattctcagccttcttcacaacctgaatgctcagctcagccagtgcagtcgggttagcaaagctcggtgcttcagtcatcagacacgctgccgccgtggttttcgggaaggcgataacgtcacggatattgtcggtgccggtcagcagcatggtcagacggtcaagaccgaatgccagacctgcgtgcggcggagtaccgtatttcagagcgtcgagcaggaagccgaatttctcgcgctgttcctcttcgttgatacccagaataccaaacaccgtctgctgcatatcaccattatggatacgtacactaccaccgcccacttcgtaaccattgatgaccatatcgtaagcgttcgccaccgcattttccggtgcagctttcagttctgcagccgtcatatctttcggactggtgaacggatggtgcattgccgtcaggccgccttcaccgtcgtcttcaaacatcgggaagtcgataacccacagcggtgcccatttgctttcgtcggtcagaccaaggtctttacccactttcaggcgcagtgcacccatcgcgtcggcaacaattttcttgttgtcggcaccgaagaaaatcatatcgccatcttgcgcggcagtacgatccaggatgtcttcgatgatttctgcattaaggaacttcgctaccgggctgttgataccttccagacctttcgcgcgttcgttaactttgatgtaagccagacctttcgcgccgtagattttaacgaagttaccgtattcgtcgatctgcttacgggtcaggcttgcgccgcccggaacgcgcagagccgctacgcgacctttcggatcgttcgccggacctgcaaatacagcaaactcaacagatttcagcagatcagcaacgtcagtcagttccatcgggttacgcagatccggtttatcagaaccataacggcgttctgcttccgcaaaggtcattaccgggaaatcgcccagatccacacccttcacttccagccacagatgacgcaccagcgcttccatcacttcacgcacttgcggcgcggtcatgaaagaagtttccacatcgatctgagtaaattcaggctgacggtcagcacgcaggtcttcgtcacggaagcatttaacgatctgatagtaacggtcaaaaccggacatcatcagcagctgtttgaacaactgcggggattgcggcagtgcgtagaatttacctttgtgcacacgagaaggcaccaggtagtcacgcgcgccttccggcgtggctttggtcagcatcggagtttcgatgtcgaggaagccgtggtcatccataaaacggcgcaccaggctggtgattttagcgcgggttttcaggcgctgagccatttccggacgacgcaggtcgaggtagcggtatttcagacgcgcttcttcggtgttgacgtggttagagtcaagcggcagaacatctgcgcggttgatgatagtcaggctggacgccagcacttcgatttcgccggtcgccatatcgcggttaatatttttttcgtcacgcgcacgtacggtgcccgtgacctgaatgcagaactcattacgcagttcagaggccagctttaacgcgtccgcacgatccggatcgaaaaatacctgcacgataccttcgcggtcgcgcatatcgatgaagatcaggctaccaagatcacgacgacggttgacccaaccacacagagtcacctgctgccccacgtgggacaaacggagctgtccacaatattctgtacgcatgagatatcccttaacttagctgccggcggatgccccctgctgcgcaggtgaccaagtcgcagcgttagctgtatgtcacaactgaatgaaaaaaggcggctattatactggaaattctgccgcaccgtaagagcctggcccgcgctggaacgcctcgttaccactttatatcgggcctgaaatcagactctacgccagtttgctataaaggtgttgcccgaactcataaaaattaacaaaatttgtcgttccgccatcggctaatcgcattaaggtgtgaggcacgattttgttttttcaggagtcattatgcttgaacttaatgctaaaaccactgcgctggtggtgatcgatttacaagaaggcatcttaccttttgccggtggtccacatactgccgatgaggtagttaatcgcgccgggaagctggcggcgaaatttcgcgccagcggtcagcccgtgtttctggtgcgcgttggctggtctgccgattacgctgaagcattaaaacagccggtcgatgcgcccagtccggctaaagtgttgcccgaaaattggtggcaacatcctgctgcattaggtgcaaccgacagcgatatcgaaatcatcaaacgtcaatggggtgcgttttacggtacggatctggagttgcaattacgccgccgaggtatcgatacaatagtgttatgtgggatcagcaccaatatcggtgttgaatccaccgcccgcaatgcctgggaacttggctttaatctggtgattgccgaagacgcctgtagtgccgccagcgccgagcagcacaataacagtatcaaccatatctacccgcgcatcgcccgtgtgcgtagcgtggaagagatcctcaacgcgttatgatttacatcggtctaccgcaatggagccatcctaaatgggtgcggttggggatcaccagccttgaagagtatgcccgccactttaactgcgtggagggcaacaccacgctttacgccctgccgaaacccgaggttgtcctgcgctggcgtgagcagaccacagatgacttccgcttctgttttaagtttccggcgaccattagccatcaggcagcattacggcattgcgatgatttagtgactgaatttttgacccgcatgagtccgttggctccgcgcattgggcaatactggctgcaactgcctgccacattcggcccacgggagctgcctgcgctttggcattttctcgattctcttcctggcgaatttaattatggcgtggaagtccgccatccacagtttttcgccaaaggagaagaggaacaaacgcttaatcgcggtttacatcagcgcggcgttaatcgggtgattttagacagccgcccggttcatgcagcacgtccacacagtgaagctattcgcgacgctcaacgaaaaaaacctaaagttccggtacatgctgtactgacggcgacaaatccgctgatccgttttatcggtagtgatgatatgacgcaaaaccgggaattatttcaggtctggttacaaaaattagcgcagtggcatcagaccactacgccttatctttttttacatacgccagacattgcccaggcaccggaactggtacataccctgtgggaagacttacgtaaaacgcttccagagatcggagcagttccggctattccacagcaatcttctcttttctgaatttgccacctatcatagacaggtgccatcggccattttaaagggagtttgtatggtaagcgcgctgtacgccgttttaagtgcgttgttattaatgaagttctcttttgatgtcgttcgcctgcgaatgcagtaccgcgttgcctatggcgacggcggttttagcgaactgcaaagcgctattcgcattcatggtaacgcggtggaatatattcccatcgcgattgtgctgatgctgtttatggaaatgaatggcgcagaaacctggatggtgcatatttgcggcatcgttttgcttgctggtcgtctgatgcattattacggttttcatcaccgtctgttccgctggcgacgttccggcatgagcgccacctggtgtgcgctgttgctgatggtgctggcgaatctttggtatatgccctgggagttggttttctccctgcgttaacgcacaatacgccactttctttttcccggatttttacgttatgtctcaccgcgacacgctattttctgcccctatcgccagactgggcgactggacctttgatgaacgggtagctgaagtcttcccggatatgatccagcgttccgtacccggctattccaatattatttccatgattggtatgttagccgagcgcttcgttcaacctggtacgcaggtttacgatctgggttgttctctgggcgcggcgacgctcagcgtgcgtcgcaacattcatcatgataattgcaaaattattgccatcgacaactccccggcgatgattgaacgctgccgtcgtcatattgacgcctataaagcccctacgccagtagacgtcattgaaggtgatattcgcgatatcgccattgaaaacgcaagcatggtggtgctgaattttaccctgcaattcctggaaccttccgagcgccaggcgttactggataaaatttatcaagggctgaaccccggcggcgcgctggtgcttagcgaaaaattcagtttcgaagatgccaaagttggtgaactgttgttcaacatgcaccacgactttaaacgtgccaacggttacagcgaactggagatcagccagaagcgcagcatgctggaaaacgtgatgctgaccgattccgtggaaacccataaagcacgcctgcataacgccggttttgagcatagtgagctgtggttccagtgctttaactttggtagtctggtggcattaaaagcagaggacgctgcatgatcgactttggtaacttttattctctgattgccaaaaatcatcttagtcactggctcgaaacgctgcccgcgcagattgctaactggcagcgcgagcagcagcacgggttgtttaagcagtggagtaatgcggtggagtttctacctgaaattaaaccgtatcgtcttgatttattgcatagcgttacggcagaaagcgaagagccactgagcgcagggcaaattaaacgcattgaaacgctgatgcgcaacctgatgccgtggcgcaaagggccgttcagtctgtatggcgtcaacatcgataccgaatggcgttccgactggaaatgggatcgtgttctgccccatctttctgatttaaccggacgcaccattctggatgtcggctgcggcagcggttatcacatgtggcgcatgattggcgcaggcgcgcacctcgcggtggggatcgaccctacgcaactgtttctgtgccagtttgaagcggtgcgtaaactactgggtaatgatcagcgcgcgcatttgttaccgttaggtattgaacaacttccggcactgaaagcctttgataccgtctttagcatgggcgtgctttaccatcgccgtagtccgctggagcatctatggcagttgaaagatcaactggtcaatgaaggtgaactggtgctggaaacgctggttattgatggtgatgagaacacggtgctggtaccaggcgatcgttacgcgcaaatgcgtaatgtctatttcatcccttccgcgctggcgctgaaaaactggctgaagaagtgtggttttgtagatatccgcattgcggatgtgagcgttaccaccacagaagagcagcgacgcaccgaatggatggttaccgaaagcctggccgatttcctcgacccacatgatccgggtaaaacggtggaaggttatccggcacctaaacgcgcggtgctgattgcgcgcaagccgtaaaggtctggtattactgccggatgcggcgtgaacgccttatccggcctacaaaaccttgctaattcaatatattgcagggactatgtaggcctgataagcatagcgcatcaggcagctttacgtttgcataacctcagcgcccgtttccgggcgctattcacgtcttacgcctgaacagctggctgatcaaacgccgttaacttcggtgcattgcccgtatatttttcgatatacaccaacgcactgttaccggcacaggcatttgccagctggctgctggggatatccgccgttaacacgttcgcactgccgtttttacacaagccattttccagatctggccatgcaccttcatgcacgcataccacgccttttttgatcccgtcagtcaccaccgcgcctgtcaaaatctgaccacgtttgttccagacacgcaccagatcgccattcgcaataccaaagcgtgcagcatcttcggtgtgaatagtgattggttcacgatcggcgatcgcatattttttacgcagttccgcatagttaagctgactgtgtaaacggtgtgccggatgtgcggtcagaagctgtaactgcttctcgtcggcggtacctttccattcatcaggagccagccaggttgggtgtgccgggcaatccttatagccaaatttttccaacgttttactatagatttcaattttgccgcttggcgtacccagcgcatttttcaccggatcggcgcggaaatcaccataacgaacgtactgttcgttcttctcgctgtggcgcatttcgatcagtttattttgctgccagaaggcattaaacattggcatagtgacgcgttgcgcacgggcacctttctgagcggcatcatagaaaaatttcagccacgccatttcatctttaccttcggtatagatctcttttccgccaggtttgagtaattccgcaagatcggcaaacacgtcaaaatcgttacgcgcttcaaattgcggagcaacagcctgcttcatcggcacaatatgctggttgctgtaatcaccggtcatcgtcaagtcattgcgctcaaagcttgtggtgatcggtaatacgatatctgcgtgtttggctgctgcggtccagtagcattcagaaacgacgatcatctccggtttctgccatgctttaatcagacgattagtatcctggtgatgggtaaagttaccgccacccgcccaccagatcattttgatattcggatacgtttgttctttaccgttatgctgatatttgccgccaggattttccagcgcatcgacgatacgggcaacaggaatcgccgtcattccgccatcatcagcggcctcgctggcatgtccggcaatcgccgcagacatttccggcagcacgccgccaacacgcgtcgggttgccaccgttggagtaatgataagagaaaccaaaaccgccgcccggtgtaccaatctgccctaacatcgccgccagcgtcaccagcatccagtgtttctgttcaccatattgctggcgctgaattccccagcctgccatcagcattgtgcgattcgccgccatcagttcagcgagtttgactatctgcgcttccggtacgccagtaatttccgccgcccagaccgcgctcttcggcgtattatcgctcttacctgtcagatactcttcaaactgcggatacccggtagtgtatttttcaaggaacactttatcgtgtttgccttgtgtcatcagggtatgcgcaatccctaacatcagtgccacgtcggtgcccatattcggcgcgatccaggtggcattatcgtcaaagaattcgatggtttcggagcggataggatcaatggcaatcactggtttgccagattttttcagctgatggaagtattccagcccttgctcatcggtactgctccaggcaatttttaaggtattcagcgggttcattccccacagcaccacaacctggctgttttccagaatcagcggccaggaggtctgctgttcatacacctctacagaaccgaccacatgcggcatgatcacctgtgctgccccggtactataatcgccgctatgcccggaataaccgcccgccaggttcatataacgttgcagtaaggtttgcgctttatgcaacacgccagaagagcgccagccgtaagatccggcaaaaatggcgcttggtccgttagctttacgaatacgatcatgttgctcatgaatcagttttaatgcctgttcccagctcacctgtacataggtatcttcgccacgacctttcgccggttgcagtggattatcgagatagctttttctcaccatcggatgctgaatacgcgccgtggtgtgtacctgatccgccgccgtagactgtaaggaattcggtatggttttcgccagcgcgcctgtactagaaacaatcttgccgtccttcacttctacgttcatcgctccccaacgtcccgcggtgaggattttaccgcccttctcttctgcccatgcggggagcggtgctgcgcttgtcaccaccagcgctccagcggcaataccgctgtgtttaataaattcacgtcttgttaatgtcataacttcctccctgatcaacgaggatcactgtttctcggtaatatctttggcgttgtactggaaataccgcgttaaaatgtccagttcgttttcgctcatgctggttcgtgcccccattcctttggcaatggacggccacgcattgacggtgtaatggtcggcggcaataggggcatgacaaccagcgcaataggtatcgtcaagtttttcagcgtattgccatagcggtttacggtccgctaatgcgggatcggtaagcgcaccctgtaaagacgcctgacgccattgattgccgtattcgtcagcctgccattccccgtttacagtgagcgccttgataccttcttcacttaatgtggctagcgccagccgttgacctgccgccaggtagagcgtgttttcactgccctgcatttgataaccctgcaacagaacgatcggctgtttgccactggcatcaacgacggtgagatcggttccaggattcacggtagccagctcgcctatgtgagaagttttgaaaggataaatatgtgcgccattagtaacactagtagcggcctgactttccagctcatgcgccgcgttgtcatccatttttatttctggcggaaaatgggcaatgcctttatgacaatcgatacaggtttcgctgtccttttgtgctttgttatgcattttctgcgcagattcactttggctggcaatatccatggcatcaaaagaatggcaactacggcacgttgcagagtcagtggcttttaattctttccatactgtttcggccatttcctggcgatgagcttcgaacttatcgtcactgtctattttgccgctaacaaattcatgataaatatctttagatgcctttaatttagcaaataaataatccatcccactctttggaatatggcaatcggcacattccgcacgtatccctttctggttgctaaagtggacagttccctgatattcctcaaaaggtttactcatgctgtggcaggaaaggcaaaatgctgtatcgctcgttttatgtaagactttttgcgccagcaataacccgccgccaccaaccacaaccgctatcagcaaaaacaataacccaatgcgttttttccctcgcatagattcctctaattaaattactggacaccgaaatcattgtataattaaatatacaacgaattaaccgcttgcataattaggcacaacactgcctgaaacaatcgataaagaatatgatttattacaatgtaatcattaattgctaaggaataacccagttgctatttagaatatatatttatcagttttagtaatttaaatcccataattaatgtgaatatatacaatatttttagcacaacgctatgcgcactgtcacccgctcaacagatcacggttatcgttcgttttttatactgttcagggataaaaaaaggcccctgttgaaattgcaggggcctggtacgagcaagcatcatattgggcgacatgatgcaacggtaaaaatcatttggcctgatggcgttcaatgattcctttcatttcagcaaccgccgccccgtctacgatataacggctatactcgtccgcgtgttcatcactactcatggacaatccttgattacgataacgcatcggactggcttgccacgctcccgcggagctatggacttccagcactccggcatcgaggaagtggtgcaggttttctgcacggactcctgctccggccataatgattggagcatcacgatgggcaataagttccataattttacttaaaccttgcagtgcgtcacttttttgcccacttgtcagtacccgggcaatgcccaattccgcaagattattgagtgtatataaagggttagcgcacatatcgaaggcgcgatgaaaagtcactgccagcggaccggcagcagccattattttttccattcgtggcatatcgacattcccgtcaacatcgagaacgcccgtcaccagtccaggaaaacctaattcgcggaccgtgcgcacatcctcaagaatggcggcaaactcaccgtcgctgtagcaaaaatcaccaccgcgtgggcgaattatcggatgcacagggatcgtcacccgctggcgcacggatttcagtacacccaagctcggcgttaagcccccctcttttggggctgcgcataattcaactctgtctgcgccgttttgctgcgccgttagtgcacattccatgctgtaacagcaaatttccagtaatgccatttttactccttaattacgcgctctgctcgctggcaacgatctcttcaatggaccacggatgaaacttaatagttgttttgccatcggtgaccgccagcgtcggattcggtaatcgctcatgctcaccttttgggctactggttttcacactgatccccggtaggctgagtccttcatcagaaagcaatgccagcgcacgggcattcagcgtttctggatcacccggcagaacgatttcaatatgttcccaaccttcgtgtgggtaacgtttttccccgggccacggtagctccacaatagaaaactgccagtgcgcaacctgtaccggttcatgcaatttaaacagacaaatcggtctgccattgatcatattttcactcaaaagctcgccacactgttcaaacccgcgacgccagcgttcagcagtggcgttttgatggcaacgcaaagaaatgtgatcggcagtcagcggagtgatattcaaccccagacggcgggaaagttcatctaatgcgtggataaatcgcggtaaatcgcttgcaatatcctgcagctcgtcgatagattgccagttcgccataatcactcttcgtctttcagtaaaagcgttaatttaccctgttgccctgtgccaaccaaccgctgatttcacgccgcttctgatgcaatagtgaaaacggcaatacgccacgcgcacgttgctgacgaaaacagccatttgcagtatactcccgccctaatttctttaactggtgcgggcaatttttgctcgcttcatcaatgtaaggtattccggtgaatattcaggctcttctcagtgaaaaagtccgtcaggccatgattgcggcaggcgcgcctgcggattgcgaaccgcaggttcgtcagagtgcaaaagttcagttcggcgactatcaggctaacggcatgatggcagttgctaaaaaactgggtatggcaccgcgacaattagcagagcaggtgctgactcatctggatcttaacggtatcgccagcaaagttgagatcgccggtccaggctttatcaacattttccttgatccggcattcctggctgaacatgttcagcaggcgctggcgtccgatcgtctcggtgttgctacgccagaaaaacagaccattgtggttgactactctgcgccaaacgtggcgaaagagatgcatgtcggtcacctgcgctctaccattattggtgacgcagcagtgcgtactctggagttcctcggtcacaaagtgattcgcgcaaaccacgtcggcgactggggcactcagttcggtatgctgattgcatggctggaaaagcagcagcaggaaaacgccggtgaaatggagctggctgaccttgaaggtttctaccgcgatgcgaaaaagcattacgatgaagatgaagagttcgccgagcgcgcacgtaactacgtggtaaaactgcaaagcggtgacgaatatttccgcgagatgtggcgcaaactggtcgacatcaccatgacgcagaaccagatcacctacgatcgtctcaacgtgacgctgacccgtgatgacgtgatgggcgaaagcctctacaacccgatgctgccaggaattgtggcggatctcaaagccaaaggtctggcagtagaaagcgaaggggcgaccgtcgtattccttgatgagtttaaaaacaaggaaggcgaaccgatgggcgtgatcattcagaagaaagatggcggctatctctacaccaccactgatatcgcctgtgcgaaatatcgttatgaaacactgcatgccgatcgcgtgctgtattacatcgactcccgtcagcatcaacacctgatgcaggcatgggcgatcgtccgtaaagcaggctatgtaccggaatccgtaccgctggaacaccacatgttcggcatgatgctgggtaaagacggcaaaccgttcaaaacccgcgcgggtggtacagtgaaactggccgatctgctggatgaagccctggaacgtgcacgccgtctggtggcagaaaagaacccggatatgccagccgacgagctggaaaaactggctaacgcggttggtattggtgcggtgaaatatgcggatctctccaaaaaccgcaccacggactacatcttcgactgggacaacatgctggcgtttgagggtaataccgcgccatacatgcagtatgcatacacgcgtgtattgtccgtgttccgtaaagcagaaattgacgaagagcaactggctgcagctccggttatcatccgtgaagatcgtgaagcgcaactggcagctcgcctgctgcagtttgaagaaaccctcaccgtggttgcccgtgaaggcacgccgcatgtaatgtgtgcttacctgtacgatctggccggtctgttctctggcttctacgagcactgcccgatcctcagcgcagaaaacgaagaagtgcgtaacagccgtctaaaactggcacaactgacggcgaagacgctgaagctgggtctggatacgctgggtattgagactgtagagcgtatgtaatcgatttttcgtgagagtgaagcctgatcagggttagccgatcaggcttttttattgccatctaaatgtattctgaaaatggacatgccattgttttctcactgttggataagaggccagaagcgtaatatccggccccagggaaacgataacggttgaatttaaggaataccgcagtgtttaaatttcttgtattaacattaggcattatctcttgccaggcttacgcagaagatacggttatagtaaacgaccatgacattagtgccatcaaagattgttggcaaaaaaatagtgatgatgatactgacgttaacgtgatcaaaagttgcctgcgacaagaatacaatctcgtcgatgcgcaattaaataaagcctatggtgaagcttatcgttatatagaacaagtgccacgcacaggtgtaaaaaaacctgataccgaacaacttaacttgcttaaaaaaagtcagcgagcctggctggattttagggacaaagaatgtgaattaatccttagtaatgaggacgttcaggatttaagtgacccttattctgaaagtgaatggctcagttgtatgatcatacagaccaatacgcgaactcgccagttgcagctataccgtaactctgaagatttttatccaagccctttgacaagaggataattcacatctttttggcatgttttgttgcaagctattcctgataaataattgcaacaagacatcgagcctttttcactgagttattaaacatactcgcgagcgcgtcgctacgctagcaagcaaaaatgaaacaggaataatcgaaatgggatgttgcgcacagtcaaaataactcaccgtaaataatcatctgctataaataatcactttcatgcaataccagataagctatttttaaacagacacttaccgcacaacaaactaattaaatacaaagaaaggcaacaatcaacttaatgttaatgaaatgttttacatatattaaccacttgtttaatgcggagaatcagtacactattttcttataattacatttgaaattatatgatcaccgggagtgattgattaattatctttactaataatcagactaatatttacctgtttgaccgagttgggattgcgtcgtttctccattaggagtaaagctttaatgtcacctgaagttcacagaataaggaacaggttatgagctatagcaatattcttgtcgctgttgcggttacaccggaaagtcagcaactgctggcaaaagcggtatctatcgccaggccagtaaagggacacatcagtttaattactctcgcttccgacccggaaatgtacaatcaattagctgcgccgatgcttgaagatttacgcagcgtgatgcatgaagaaacgcaaagctttcttgataagttaattcaggatgcggggtatcccgttgacaagacgtttattgcctacggtgagttaagcgaacatattctggaagtatgtcacaagcatcatttcgatttggtgatttgcggtaatcacaatcacagtttctttagccgagcatcctgcagcgcgaaaagagttattgccagtagtgaggtcgatgtgctgttagttccacttacgggagattaaccgctcttacgcaagctttggaaaggtagcaactttatcgcgctgctggctttccgcgcttcgcggaactatctgctttaggtcgctaatgaagcactcctgccagtggttaatatcgtttttcacgataacgtccagcatttctgcatgacgggaaatacgttccgccaggctcatagtcaatgcacgatccagcgcagctgcaacttcgtcacgatcgtaggggttaacaattaacgcgctcgttaactcgtttgccgctcccgcaaattggctaagaacaagaacgcccggattggctgggtcctgagcagcaacatactcttttgctaccaggttcatcccgtcacgcagtggcgtcactaagcccacgtcagagtagcggaatattttcatcagtaatttacggtcaaaatgctgattcaaataataaagcggcgtccagcctaattgcccgtatttaccattaattcgtccagcttcattttcgagctgatgacgaatatcctgataggcttgcacatcaccacggctcgttggtgcaatctgggtataacgaattttaccatgatgctgcggatatttttccagcaacgcttcataggcgagaaaacgctctggcaaacctttggaataatccagccgttcgacagaaaagatattttgtacgtttttcagttccgctttaagttgcgccagttttggcggcagtggcccggcagcctgtttggctatttctttcggttcaatgccgatcgggtagacttctgttcgaaatgctttgccccaggctgtatggctttttgcgctacgtgtcgtgacgcgggtcaggttagaaagacaatccaggaacgccagacgatcgttttctgtctggaaacccagcaaatcataatcacaaagctgttcaagcaaggtgtcatatgtcggcagcgcgttgaagatttccggtgtcgggaaaggaatatgcagaaagaaaccaatgcgattattcactccccgtttgcgtaattcatgcgcaaatggcaacaggtgataatcgtggatccagataatgtcatcgtcttgcaacagcggcagtaatttatctgccagcaacgcatttacgcgtagatagccgtcccaggcaggacgctgaaattgcaccagatcgagccgataatgaaaagcgggccagagaacggcattggagaattggttgtagtattcgtcaaggtcctgttcgctgaggttaaaagaggcccacgtaatgttaccttttttcaccttttttagcggctgatcctcattccctgtttcaccactccagccaaaccacagtccgcctgcggctttcagtgcccccagtatgccaacggcaaggccaccggcactggcggcgtgctcgtctggtggtgcaatccggttagatactacgactaaacgactcatagtcatcactcctgttatttttacttagatactacgactaaagctctcatagtcatcactcctgttattttctcttttttgttgtaatgcggtggttatcatttcaagccagctccagacatccggcacacccgccagtcgccaacttgcctgagttgcacctgtgccaatttttacactcattccgcccagtcggttaacgactgcgaagccagattcatcggttaaatcatcgcccagaaatacgggcgttcgcccgataaagggagcttcctgcataaaagctgcaattgcctcacctttactggtacctctcggtttgatctcgacaacacactttccctgctgtaacgccatttgtggccagatctgagtaatacgttgcgctaatgtcattaatgcgtcttcatgctgcggagcctgacgataatgcagcgcaaaagccatccctttcgcctccagctccgcgccgggatactgagcgatgactgtatgcagttgcacgctaatatcacgcgcaatcgcatccggcagatgaacgatatgtgttttaccattgatgtcacggcgctccgccccatgcacgcccgctaacgggaagcgataaggttttgccagtgcgtcaagctccaccatactgcgcccacttatcaatgccaatgcaccatcacttgcggttgccagtagctgtagtccttgcagaatattgtcaggcacgacgacctgatcgggatgcggtttgatttccgccagcgttccatcaagatcaaaaaaccaggcatatttcgcggatagttcaggggtttcggttaacggttctgtcacccggttctcctccttctcttttcttattgtgttgcgcagaacgcgctttacagacatgtaagtatagacagtgtgacgggggtcgccatttgcaacgaagaacagccaaccgttatggcggttggctatggtgggaaaaaacgctaaattgttgcagaaaaaagcatcagacagtgcgtttcgctttttgcttgtaacggtcgaagatcaccgctgccagcaggattaagccgcgaaccacgtactgcgcgaaaggagaaatattaagcaggttcatggcgttttccacggtgcctaaaattaagatacccgccaccacataactgatttttccgatgccacctttcagagaaacgccacctaaaacgcaggcggagataacaatcagctcataaccaatgctcgtcattggctgcccactggtcatacgactagccagaataattccggctatcgcacttaccaggccactgagaacaaagataataattttggtgcgaacaaccggtacacccgccagacgcgcggcctcttcgttcccgccaatcgccagggtgttacgaccaaaggtggttttattcagcagcaaaccaaagataatcagacacgcgacggtgagccagattggcgcaggcagaccgaaccagttggcgtaaccaagggcaaagaagctttcatcttcgataccgaccgctttaccgtcactaatgatgtacgccagacctcgaacaatctgcatcgttgccaatgtcgtgatcagagcatttattttcagtttggcgataacaaagccattgaccaggccacagagaacgcccagcaacaaccccgctgccacgccaatccacaggctttcagtcaggttaataaccaccgccgtggtgacacccgcacaggcaattacggaggcgacagaaaggtcaaagtcaccggaagcgaggcagaacaacatgccacaagccaccatcccgctcatggaaattgccaggcccaaccctttcatattaatgaaggtggcaaaatttgggacaaaaatggcacaggcgataaagagcaccgcaaacaccaccagcatgccgtactgatcccagatacgcccgaagctgaaactgctcttaggtgcgccagacccgcttgtagaaacagaagacatcatactctccttactcaggcaacagcctggctgactttaggcatcgcaaggctcagtgcctgacgctcatctgcctgctcgtgtaacaattcaccggcgatttcaccttcccgcatcaccacaatccggtcggcaacgccgaggacttcaggtaagtcgctggaggcaaacagcaccgccacgccctgcgccgccagcgcataaattacgttatatatttcgtgcttagcgccaacatcaatgccgcgcgtaggttcatccagcaaaatgaccttcatctcttcgcttaaccagcggcccagaatggctttttgctgatttccgccactgagattcatgatcagttgctccgcgcccggcgttttgatgttgaggctacgaatgtggtgatcggcattgttttcttcccaaccgttgttgattacacaaccgccgagcacatgtttacgtctggcactgatgttgatattgtcgcgaacggagtgcacgggaataatgccttccgctttgcgatcttccgggcagagcatcatgcctgcggcaatggcgtggctcggtttacgaatatcgatcggctgttggtcgatataaacctgaccggcggtgatttgcgtcccgccaaacatgcctttcattaattcgctacgccccgcccctaccagaccaaacagcccaacaatttcaccactgcgaaccgccagacttattggcgtacgcacgcctggtgctttcacagcatcaagacgtaggcgctcctcgccataactacgcggttgccagccgtagatatcgccaatgtcgcgcccgaccatcgcctgcaccagcgcgtcgtggtcaacctgctacatatcggtaaaggttttgacataacgtccatctttaaagacagtaatggcatcgctgagggcaaatatttcttccatacggtgagaaacgtataagattacccgcccctcttttcgcagttcacgaataacgcggaaaagattgtcgatttcacgggcagagagggagctggttggctcatcaaaggcgataattttggcgttacgcgccagcgctttggcgatttcaaccatctgccactgaccaatggagagatatttcagcggcgtgtccgggtcaatatccataccaagatgtttaagttgtaaacccgcctcataattcagcaaactgcgattcacaatgccgcctttatgcggcagctggccgagatagatgttttccgcgacggtcatttccggcacgagatgcagttcctggtaaataatcgccacgcccgcgttaagtgctgcggtcgtgtcggaaaaggacatttcctgcccattaatcactacagaacccgtggttggcgcatagttgccgctgaggatttttaagagagtactttttcctgcgccattttcacccatcaacgcatgaacctgaccggcatagcagtcaaaactaatatccgtcagcgccttaacgccgggaaacgttttaccgatgccgcgaaaactgagatacggggtagactgttgcataacgtctccgtgaatcactggtcgttcacaccccctctgcatcatgcagaggggaatttttccggcaaattacttaccgcctaaaccttttttctccagttcttctttaaagttgtcacgcgtgatcagtaccacgtcggtaacttcggtaaattttggcggttcaacgtcttttgctacccagttgtaaagcatttcgctggatttatagccatgtacgtccgggcttggcagcagggaaccgtagaagccggttgcctgtgctttagacagttcgctcaccgcatccacaccgttaatgccaatgccgatgatatcggccgctttaaagccctgaccttccgtcgcgcgtacgccgcccagcacggtgctgtcgttcataccgacgatcagccaatgtttaacttccggatgttgaaccagcatactgttggcagcgtcaaatgcccccgggatgtcgttagatttggtaggtacctgataaatttgtttttccgggaatccggccgctttcagcgcatccatagatcccgtagtacggcggcgggcggtatccagttcgttggcggtaatcgccatcaccgcgctttctttgacatcccagccacgtttctgcatctctttatacagttcctggccctgacgttcgccaattttagtcgccgccatcatcaccagcggaacggtatccattggcttacctttggcgttaacaaactggtcatccacggcaatgactttcatatcgtagccacgcgctttcgcgacgatggcagagccgagtttggggtccggagtacaaataacgaaaccttttgcgccactggcagccaggctgtcgatcgcgttcaatgttttttcgccatccggcacggcaatcttaataacctcaaaccctaaatccttcccggctttatcggcaaacttccattcggtctggaaccacggctcttccggttgcttcaccagaaaaccgagcttcaggttctccgccatagcggattgactcataacggctgccagaccaatggctgccagggctttagtaaatttgtgcatggttctctccagctttagtgtcgttttgtgtagggcaaaaacgaatgacattcgttaaattaatcggaaaacaaagcattaccttttaactaaaagataagtgactgtgttgacatagttttagcgagaaattaattctccataggagagcaatatcacatcgcagaattacagtgagaacgtgcataaatttagcgggaaaagacataagggaaagccaatttgtcagacaaattgtcgaatgcacagcagattaatccataagattagcctggaaatccttgttgtctttggtacccatgcgggatgtcttctttttaaccagtcaataggccgcattacctggcgttgagtttttgaaatggtgtaataaccgcaactcaaagatgtggaaaatgcacgtcattcatttcgtcattaattatcactgtgctcattaattaacagaacacgtataatgagagccatctcgcaaaaatgaaaaaacgttttataaaatcatcacttcatcatgaattcaaattcattgattaatatcaacaagatacaaaaagcactatcattaaaattcattgcagttacattgatttcatcaatgaaatgtaaaaatatataaacttgatgatttaagcattttcttatacccgttcagacgttattcttatttcagatcatcgtcagaattgactccacgatcacatttcggaccggcagaaaggaattattctgcaaacagtaattatggtgttttgatttatcttgcacctctccacttctggatataaggatattaggtatggcaaccgctggaatgcttctcaaactcaactctcaaatgaaccgcgagttttacgcatccaatctctaccttcacctgagtaactggtgttctgaacagagtctgaacggcaccgccactttccttcgcgcccaggcacagagtaatgtgacccaaatgatgcgcatgtttaactttatgaagagtgtcggcgctacccccatcgttaaagccattgatgttcccggtgaaaaactgaactctctggaagaactgttccaaaaaacgatggaagaatacgagcaacgttctagtacgttggcacagttagccgatgaagcgaaagaactgaatgatgatagtaccgtcaatttcctgcgcgatctggaaaaagaacagcagcatgatggtctgttgctgcaaaccattcttgatgaagtgcgcagtgcgaaacttgcgggtatgtgccctgtgcagaccgaccaacatgttctgaatgtcgtgagtcaccagctgcattgatcatcatcggcgctaatgcattgcgccgatgaaggttttgagaaaccgctgcctcatctgtttgaagcagcggtttttttaatgggattcaccctgtggggtaaacttgagttcaataagcgcgatggctttttggattgcccgcatggtgaccgggtctgcggcggcgggatggttagtaaagtcgatattcttcagctgactggacattttttcacgaacttcaacgggcgcgattacatcgagaacatccagaatttgtttgataaccaactggcaagcaaccacatcagaaaccaattcctgatcggcattcagcggctgggacatcgtaaactcctgatagcattttgaaagccgttatagtagcgacttcacatcttcagcgatagtcacatccaccgtcatcaggacacaaaaaaacctgccggagcaggttttttgttatcggaacatattgcctggcggtacgtctttgaacgtcttgcaatagttattgaacatacttttcaggattttgcgcagtttcatcgcggcactccgaccatttgttatacaggtgttattgtctttgcgcttataatatgacaaccatcacaaaaatcaatctttatgtgatacaaatcacataaatacccctttaatgttataaaaatgataatcaaaaaacagcccccctatttctgacacctacagatggcaagaaatagcgcctgccaggcgtcttttccggccattgtcgcagcactgtaacgcgtaaaatagtgctttctcttactcttctggctggaccatgagacttctgattctgactcttagtttaataacgctggcggggtgtacggttactcgccaagcccatgtgagcgaagttgacgcggcaacaggtattgtacggttagtttatgaccaggcttttttgcagcatgcccataccgatcgttatgtcagtcgcgggatcgccgatcgcgcatgccagcaggaaggctatacccacgcggtcccctttggtcagccagtaggcaactgtagcctttttgcgggttccttatgtttgaatacggaattcactttgagttatcagtgccatcattccgccttccctgtctttctctaaatattttaatcagcgaggggatcttcgctgattaaagaaatagcggtaatgcgttttattcccattcgtatttttaataattgaagtttatattttaccttttgcaaataataaaataacaaattatagtgacgccacagcaacaaatataacctttgtggagcactatcatgctgaaaccagaaatgattgaaaaacttaatgagcagatgaacctggaactgtactctagtctgctttatcagcaaatgagcgcctggtgcagctatcataccttcgaaggtgctgccgcgttcctgcgccgtcacgcccaggaagagatgacgcatatgcagcgtctgtttgattacctgactgataccggcaatttaccgcgtattaataccgttgaatctccgtttgctgaatattccagtcttgatgaattattccaggaaacctataaacacgaacaattaatcacccagaaaattaacgaactggctcatgctgcaatgaccaatcaggactacccaacatttaatttcctgcaatggtatgtttctgagcagcatgaagaagagaaactgttcaaaagcattattgataaattaagcctggcaggcaaaagcggcgaaggtctgtattttatcgacaaagaactctctaccctcgacacacaaaactaatgctctccggcggcaggtttactgccgccgtttcaaatcagtgacggcaaatcttactctgatcggtgctaaaaccgtctttgctaggtataaatttgccttttgctgccagaaacgctaccagctctcccgctgtcatcccttctgcgctgcaggtgtgaaaacgtgcctgttcaccaaaacgcgctttaatcgcagcttccagactggcatgcgtatattgctcgccactttcaatcatcatatttaacacttcatgaccgtgaatagagtccatcgtccctcctcaaaaaaagcctagcgtagcgattgccgcttatgaagactttgcgccagcgcaggactgaatgctttttattgtacatttatatttacaccatatgtaacgtcggtttgacgaagcagccgttatgccttaacctgcgccgcagatatcactcataaagatcgtcaggacagaagaaagcgtgaaaaacagaaccctgggaagtgtttttatcgtggcgggaaccacaattggcgcaggcatgctggcaatgccgctggctgcggccggtgttggttttagcgttacgttaatcttgttgattgggctttgggcgttgatgtgctacacggcgctattactgctggaggtgtaccagcatgttccggcagataccggtctgggcacgctggcaaaacgctatctgggacgctacggtcaatggctgacgggcttcagtatgatgttcttaatgtatgctctgactgcggcatacatcagcggtgccggtgaattgttggcctccagcatcagcgactggacaggtatttctatgagcgcaaccgctggcgtgctgttgttcacttttgttgccggtggcgtggtttgtgtcggaactagtctggtcgatttatttaaccgttttctgttcagcgccaagattatttttctggtggtaatgctggtactactgctgccgcatattcacaaagtgaatcttttaaccctgccgttgcaacaggggctggctctgtctgcaatcccggtgatttttacgagctttggttttcacggtagcgtgccgagtattgtcagctatatggatggcaacattcgtaagctacgctgggtgtttataatcggtagtgcgatccccctggtggcatatattttctggcaggtggcgacgcttggcagcattgatagtacaacctttatgggattgctggctaatcatgctggattaaacgggctgttacaggcgttacgcgaaatggtggcctctccgcatgttgagctggcagtgcatttatttgctgatttagccctcgccacgagttttctcggcgttgcgttaggcttatttgattatctggctgatttatttcagcgtagtaataccgttggtggacggttgcaaactggtgcaattacgtttctgccgccgttggcgtttgcactgttttatccacgaggatttgtgatggcgctgggttacgccggtgtggcgctggcggtactggcattgattatccctagcctgttgacctggcaaagcagaaagcacaatcctcaggcgggttaccgggtcaaaggtggtcgtccggcgctggtggtggtgtttctctgtggtattgctgtgattggcgtgcaatttttgattgcggcagggttgttaccagaagtggggtgatcagatagcctcaaattccttattgggtgccagaattaacgctgacacccaatttggcctcttaatgcaggcagcactgcttaaatttcttaccactaccgcacgggcaaggatcgttacgccccggtttctcttctgctttgatcggttgctgaacagctttttcctgcggatgcgccatccagtacgcatgtagatcaagcgccgccagtcgaatggcatctacgctctcttcaaacgcttctgggctcatcttttctacccgctcgaagttttcctcagtaccgtgcagcgcaatcgcctccagcgctggttttaagctatcgggcaacgtactccagtcagaaagtgccacgccccgcatatagccaaagcaccactcctcaacaatcgtcagctcgctgccatcaacttctcgcaagccgaataacggctcaaactgctccgggaattcgttcagacgctctgcggtatcggccatatgttgaaaagccagattcataaagcgcgtcatctctttctcactcgcccagcgcggcacatagtcagccccaccccacacggcaaccagccactgttccggttcaatctcttgcggagaactcaacaccgccgtcaataaaccgtccagctccgccacatcaaggatggcgtggtcagtgttgtatttggtcagaatatcgtccagccattccaactcactttcgtttaacggtcccgttttcatacgcttttccttgtggatctcaactcgccagcacctatcttacatgccggtccgtatcagagatactttttgagtggctttgctggtgattaaaaattaaggagggtgtaacgacaagttgcaggcacaaaaaaaccacccgaaggtggtttcacgacactgcttattgctttgattttattcttatctttcccatggtacccggagcgggacttgaacccgcacagcgcgaacgccgagggattttaaatcccttgtgtctaccgattccaccatccgggctcgggaagaaagtggaggcgcgttccggagtcgaaccggactagacggatttgcaatccgctacataaccgctttgttaacgcgccaaattcttcaggcctttcagccagacatccgcttgacgccgatgtcttttaaactggagcgggaaacgagactcgaactcgcgaccccgaccttggcaaggtcgtgctctaccaactgagctattcccgcattcatcaagcaatcagttaatcacttgattttattatcgtctggcaatcagtgccgccgttcgatgcgttgcattctacttacctggcgcgatgagtcaacgatatttttcaccacttttgatcgtttgctgaaaattacgccgaaacgatcactgatcaagcaaatctgcacgcgcagcgctcaaatattgcaacatactccacagagtcagtaccgcagccacaaagaaaagtgcaataccggcgtactcaacccaaatgttcggacgccacagcagccatgccaacgccaccatctgggcagtggttttcactttcccaatccaggagacggccacgctactgcgtttacccaactccgccatccattcgcgtagcgcagaaataataatttcacgggcgatcatcgttgccgccggtaatgtcacccaccagctgtgataatgctcggttaccagcaccatggcgatagccacgagaactttatctgccacagggtcaaggaaagcaccaaaccgggtactctggttccagcggcgtgccagaaaaccatcgaaccagtcagtcaccgccgcgacgcagaaaatgagcgcggcggcaaacgggctccaggtgacaggcagataaaagaccaatacaaagaatgggataaggatgacacggaacagtgtaagcaacgtagggatattaaattgcataatgacgggtaactatctgttgtcagtaagattacccctatgttgctacagagacatcaatgtttcaagctccagaagatcttttctgccagaccttggctaatacccggcacttttgcaatttcctcgacgctggcgttacgtaaaccttgcaaaccgcccatatatttcaacaacatttgccgacgttttggcccgacgccttcaatggtttccagggaactggtatttttgaccttcgcccgttttttacggtgcccgccaatcgcgtgatcatgactttcatcgcgaatatgctggataacatgcagcgcgggactatctggcggcaaactaaatccctcaccttccggctcaaagaacagcgtttccagtccagccttacgatctgctcctttggcaacgccaagtagcagcggatgatttttatcccaactgacatccagttcggcgaagacatttttcgcctgcgcaagctggcctttgccgccgtcgataaggatcacatccgggatcttactgtcgtcaatggctttaccataacgccgacgcagcacctgattcatcgccgcataatcatcgcccggcgtgatgcctgtaatgttatagcgccgatactccgcacgcagcgggccgttagcatcaaacaccacacaggaagcgacggtttgttcgcccatggtatggctgatgtcaaagcactccatccgcttcacttccggcaatttcaacacgctggcaagcgcggtcagtcgctggtgaacggtagattgctggctaagtttgctggttaaggccgtcgccgcattggtgcgcgcgagtttcagataacgcgccctatcgccgcgaggtttggtttgaacattaatcttgcgtcccgccagttcactaagggaatcggcgagcagcgttttatcgctaagattaaaatcgagcaggatctcacccggtaaggtgcgcatctggctgccttgtaaatagaactggcctacgaaggtttctaccacctcgctcagttccgtaccgccaggcactttcgggaaatagctgcggctgccgagcactttgccctgacgaatgaacaatacgtggacacaagccatgcccgcatcgaacgccacaccaataacgtcgaggtcgtcgccggtattggaaacgaattgtttttcggtgacgcgtcgcaccgcctgaatttggtcgcgaatacgtgcagcttcttcaaactccagattctggctggcagtttccatacgactaatgagttgcgtaagcacctgatcatctttgccagacaaaaacaggcgcacatactcgacctgctgagcgtattcttcttcactcaccagtccttcaacgcacggtcccagacagcgccctatctggtattgcagacacggacggctgcgattgcgataaacactattttcgcactggcgaatggggaaaatcttttgcagtagcgccagtgtttcacgtacggcatagccattcgggaacgggccgaaatattcacctttggcatgcttcgcaccacgatgcatcgccagacgcgggtgggtatcaccactcaggaagataaaaggataacttttatcatcgcgtagcaaaacgttgtaacgcggctgatagagtttgatgtagttgtgttccagcaacagcgcttcggtttctgtgtgagtaaccgttacatcaatttgctggatctgggcgaccagcgcttcggttttgcggctagcgaggttgctacggaaatagctggaaagccgttttttcaggtctttcgctttgccgacatagataaccgtaccaccagcatcgtacatgcgataaacgcctggctggctggttacggtttttaaaaacgcttttgcgtcaaactgatcactcactgactacttaatgtctccgcattacacagaccatggcgaattgccaggtgagtcagctcaacatcgccatgaatgtttagtttactgaacatacgatagcggtagctgttcaccgttttcggactgagattgagctgttcactgatctcattgaccttctggcccttggtgatcatcagcataatctgcaattcacgttcagacaaactggcaaatgggctttctgttttttctggttcgatctggcttaacgccatttgttgagcgatgtcagaagcaatgtaacgctgcccactatagacagaacgaatcgcactcacgacttcctgcggagccgcgcctttgctgaggtagcccgcagcaccggcctgcatgactttcgctggtaaagggttttctgtatggacggtaagcatgatgattttgacatcagctgtggaacgcgcgattttacgcgtcgcctcaagaccgccaatgcccggcatactcatgtccattagcaccacgtcaacggcatttgtccggcaccacttaacggcgtcttcaccgcagcttgcctcaccgacgacttttataccctttatatcttccagaatgcgtcgtatccctgcgcgcaccagttcgtggtcatcaacaagtagaacgttgatcaaaggaatatctccagaaatagggataacgctactgatagttagtcattcgtatattagcggtttttattgcaactttgaaacgttaaaaatggtgggtattcgatttttctctcgtttttgtcaattcgattgtccacagttatggtcacgcccgtcaccaacggcttaccggatcgtttcacagtaagccctacgatgaaatgtgacaaaaattgactttattcagcaaaaatgaaaatcagcccgctgaatatgtaacattaattaacccgaacaatacgggcaaaaaacattcatgataaaaatatttattggtcattatattaacgtattttatagcactgccgatatcacgctcaaaaaacaaccactgctatttttagcaaagcttatggtatactccgccgccttaacatttttcaccgcaaattttcattgcaacatgacgaggaaaataaatgagtacgcctgatttttctactgccgagaataatcaagaactggcaaatgaagtctcctgcctgaaagcgatgctgacgctgatgctgcaggcgatgggacaagctgacgcgggccgcgtgatgttaaagatggaaaaacagcttgcgctgatcgaagacgaaacccaggctgcagtattttccaaaacggttaagcaaattaaacaagcctaccgtcagtaatataaaaccggctgatagcgtgcctttcagccggtttttgcatctggcacgcaggacagaaaagagatcaaattaagccagtagcggccgcgtaacaggcaacctgggtcttatttggtgcattaatttttttctgcatgtttttctggtggaaattgaccgtattctcagagatactcaaaatcatcgctatctctgcacttgttttcccttccgccgtccacctcagaatttctttttcgcgcttgctgaaattcatctctggcgtcatcactatttcatcatttaaacgcatcagagccatcagactttcgcgcaccagtaactgcatttttaattgcagttcatcactaagaatgggtatttcgcgcgcgctgcaacgggaaaaggacaaaaagcccagcgcccggtttggcagcattaaatactgagtgacaccgcggcgtaaaccatgtgcgcgcgcggcttcccataacggctgtgcttcgctgaataagtcatcattccacattaaatggccctgactaaagttttcagggttcagcaccggatcaattgcgagaaagttttttgcctgataataactaacccacgcctcagggtaattggtgtaaaaagccactttaggtcgagtgaatggtaccgggtggcggacacataagctatagtaatcgtactccagctgctgagcctgaagctcaatttcatggtagacctcttctgcggtctccatcctctgaaaacgcaacagcatcgtgcgacgccagctgaaaaaatccttatcctgcatagtaaaccgcaacgcccttgagagtgagtatcatttataatgataattcaaactatcacataaataagatttatatataatttatattattcaggcaatgaattacttttgcaagccatcgcattctcttatgttattaatgagttatgctgatttgttaagcagttttatcaggcttgaaatggcgtccagccccgacaggtgaatcgtcggggctgattttttcttattattgcagcagaaacttctcgaggaactggcgggtgcgaggctgctcggttccgtaacgtttatcatgttatcctaaggattatccgaaaaataatacctacgaacatcttccaggatactcctgcagcgaaatatttgttttaagctcactcacatatcgcaacatttactttactttaagacaattccaggcaaattatacaacactttacgggatagtaagtccgcctgaaaaatcgcgagagtggcgcattaggtgacccatgttgttccgtttagtcatgatgaaatattcaggtaaggggaattatcgttacgcattgagtgagggtatgccatgagtacgattattatggatttatgtagttacacccgactaggtttaaccgggtatctgttgagtagaggggttaaaaaaagagaaatcaacgacattgaaaccgttgatgaccttgccatagcttgtgatagtcagcgccctagtgtggtgtttattaatgaggactgtttcatccacgatgcttctaacagtcagcgtatcaagctcatcattaatcaacatcccaatacgttatttatcgtttttatggcaattgccaatgttcattttgatgaatatctattggtcagaaaaaatttattgatcagttctaaaagcattaaaccggaatctctcgacgatatccttggcgatattctgaaaaaagagacaacgataaccagctttttaaatatgccgacgttaagtttgagccgaaccgaaagcagtatgttgcgaatgtggatggcaggtcagggaaccattcaaatctctgaccaaatgaatatcaaagccaagaccgttagtagccataaaggtaatattaaacgtaagatcaaaacgcataataaacaggttatctaccatgtcgtccgactgacggataatgtgactaatggtatttttgtcaacatgcgctaacacattctgactggtggtttcccaccagtcaggctgaataagattactctgctttctccacaaagataccgtcctgatgccctgcttcattaaagaaccagatgccgagcgggtagtcttccaggctaaccaggtacattgtgccttcactaaactcctcaactgccagtaccacgccaggacgacgcggaccgccatccgttttgactgttacccgatcattcaccttcatcgttttcctcctgtggctttgtgccagtgtagaacaatttcgtttttctggcagcgccaggcgcgcgcgagtgctgattttctcgacggtctatacttaagagatgccaggcggacttaacgactggcggcaacaacagagtaacggttgcgaggaaagatgatgaaaaccgcaaaagagtacagcgataccgcaaaacgtgaggtcagcgtcgatgtcgatgccctgctggcggcgatcaatgaaattagcgaaagcgaagttcatcgcagccagaacgattctgaacacgttagcgtcgatggacgtgaatatcatacatggcgtgaattggcggatgccttcgaactggatattcatgacttcagcgtctctgaagtgaatcgttgaatgcacaataaaaaaatcccgaccctgagggggtcgggatgaaacttgcttaagcaagaagcacttaaaaaattcgttacaccaggaaatctgatgtgttcatcaccttatccgcaatttttttcgctgacaagaaaatattcgccatatgaatgattaacgctacttatgaatagaaatgtgacgcacgtcaccccttggtggctctggcgtcagcgggatcgctcccgaaaaaatcatctttgataatttgtgcggttttgagaatcatcctggtaagaggagtactgcgcgactatgtttagtattcaacaaccactactggtttttagcgatcttgatggcaccctgctggacagtcatagttatgactggcaaccggcagccccctggctcacccgtttacgcgaagcaaatgttcccgtcattctctgtagcagtaaaacaagtgcggaaatgctgtacttgcaaaaaacgttggggctacaaggtttaccgctgattgccgaaaatggcgcagtgatccagcttgctgagcaatggcaggagatagacggttttccacgcatcatcagtggtattagccatggcgaaatcagcctggttttaaatacgctacgcgagaaagaacattttaaattcacgacttttgatgatgtcgacgatgcaaccatcgccgaatggacgggattaagccgtagccaggcggcgctgacgcagcttcatgaggcgagcgtaacgctaatctggcgcgacagtgacgagcgtatggcacaatttaccgctcgtctgaacgaactgggcttacagtttatgcagggtgcgcgcttctggcacgtactggatgcttctgccggaaaagatcaggctgccaactggattatcgcgacctatcaacaattgagtggcaaacgcccaaccacacttggcctgggcgatgggccaaacgatgcgcccttactggaggtaatggattacgcggtgattgtgaaagggctaaatcgtgaaggggtgcatctgcatgatgaggatccggcccgcgtctggcgaacgcagcgtgaaggaccggaaggatggcgtgaagggctggaccattttttctccgcccgttaagcgttatcgctcgcgaatacccgattacgcccagcctgtttagcgagataaagccgacggtcggccagactctggagttgttcaaaatcataatcaccggtttcctcgctgctgcttacccccaggctggcactgatgcgtatcgtcgtactcttggcgatcaacatctctttttcatttaatttcagtcgaatacgttctgcgacctccgcagcctccgtcagactcgcgcctggcagaatcacacaaaactcctcaccaccgacccgcccggcaacgtcctgcgcacgcaaggaactgctaattaatccggcagcatgagaaagaacacggtcgcccgcctgatgaccaaagcggtcattaatcgctttaaaatggtcaagatcgacctgaatgacagaaaaaggatgttggtgcgtctgacacaatttagcgagcggacgggctttttcgaacagtgcgccacggttatataaacgcgttaaggtgtcgtgccacgcctgccactgcaagctgctttgcagaacatacatgttgctaaccatccggcgaatcacataccaggagatgagtaacatggtggtaaagagcgcccacagcagggttaatgcaatgctgatactgccgaaatcgccgcgcacgccttcgcttaacgtatggacacgcaccagcacaccgtcgaaatggtccagacgttcccagctaacatagcgactgtccatacgaatgccgccccgcgtgtcatgttccattgcctgcgccagcaaggccagttcacgaggatcaaaaatattccctgttggatggtcaggattggaagaggtcaaaaatctcagcttactgtcatagagctgatactcaccatcgaggtttttatcgatggcgtttcttaaaaattgctgcatagtacgcacgggaatactcatccccagcacgccataccagtagttattactgtctaccggaacactgacggtaacctgcggttcagtattgctggcgtgttccggttggctagtgaaccagcgtaccgcgcggtgacgattttctcgttgactatggccaataaaccagggttgggtgacatagccgtaataacgcgttggaacattgcgcgtaaacaaggtcggctgcgtgctaacgtaaaatccggcacggctgacatacatcgcctgttcaaccatgctgctggagttgtgcgctagtcgcagcaagtaaccaacttccagtgcagcggtaatttcattgtcgaggctttcattttcgcgagacaggagattcccctcgctgactaatgcatcgctcacaccattaactggcagagtgcgtcgtcggttgagttcgattttccaggcgtgctcgtcgcgatgctgttcgaactcggttacagcatcacgcagagaggtgaaatccagtggcgctacgagagcttcgcgcatgccattacgtaaaaagatcagtttgtcgacgttatactgcaaatgcttatcgagcgcgttggcaacgttttccagatgattacgctggctggagatataggcatcttccagcaccaccacttcacgccaggtgagcaaggtggaaaaaagcaataccacgataaagcagagattaacgacatgaccaggccccaggcggcgtgcgagttttttcaaccagctctggttttccatttttgtctcgtgctgcaccctgacgactcccaacctgcttttttatgattctggcataacctggcgatagcgtaccgcaaaacagcgataattttataatggtggcatgataagacgcgactatcattcattgcaggcattagcacaccaggccggatgtgatccggcctgatgttaatgataccctttcacacttcttccgcagaacgactcccctcccccggaacaagctcggtttcatgaaaagcttcccgcttgaccccgtaaccgtcataccaacgacactcaaccataccgctggagtatccagtgacaatcatccgcgggccgccctctttaaccgtaacttcctcactaaccataaagctcatactcgcctccttttttcgagtgaaacttgttcaccttagttgaagatggcgaattttgcataatagccagtgcgagtattaatgtgcctgaccgcgcattttctctacggctttcactcccagcaccacgatgccgccgatgataaatccaagaatcagatttaaaacagtcggtaatatcatcgccactactgcactttgctgcccggcgaaatgttcaatggcgtgatgcagcggcgcaattccatgtaccacaatcccaccgccgacgaggaacatcgccagcgtgccgacaatgcttaacgctttcatcagccagggcgcgataatcaataaccctttacctaatgcctgcatcagcgcgctggatttttccgccagccaataccccaggtcatcaatcttaacgataacccctaccagaccgtagacgcccacggtcactaccagcgcgatgccactaagcaccagcacctgattaagcaacggcgcttcggccacaatccccagcgtgatggcgacgatttccgcagacaatataaaatcggtacgaatcgccccttttattttgtccttttcaaacttcagcggatcctgcgccgccagcttctccagacgctgctggctctgcgccggatcttctttatgtttacgcgcctccagcatatgcagcactttctctactccttcaaagcagagaaacgcgccaccaatcatcaacagaggcgtaatcgcccacgggataaacgcactgatgatcagcgccagcggcaccagaatcactttattaatcaggcttcctttcgccacgccccagaccacgggaagttcccggttggcccgcacgccactaacttgttgcgcattgaggcttaagtcatcccctaatacaccggcggttttcttcgccgccagtttgcccatcacggagatatcgtccagtagtgtggcgatatcatcgagcaacgtcagtaaactactcccggccaaaagcattccctctcatttttattgttgaagggtgtaagtatgaagcaaaaacggcagctctgatacttgcttcacaggtcaacatttttttaacaatcaagtgcaattatatctctcgccagcagaatgattttcacgtttactatgaaccacctttttatttccaccgtgagggattatgcgtttccgccagttgttaccgctttttggcgcgctgtttgcgttgtatatcatttggggcagtacctattttgtcattcggattggcgtggaaagctggcctccgttaatgatggcgggcgttcgattcctggcagccggtattttattgctggcatttttgctactgcgcggacacaaactccccccgctacgtccgctgctcaatgccgcgctgattggcctgttattgctggctgtcggtaatggcatggtgacggttgccgaacatcaaaatgttccttccggcatcgccgccgtagtggttgcaaccgtgcccctctttaccctgtgcttcagccgcctgtttggcattaaaacgcgcaaactggaatgggtgggtattgccattgggcttgccggaatcatcatgctcaatagcggtggaaatttaagcggcaatccgtggggcgcgattctgattttaatcggcagcattagctgggcgtttggcagtgtttatggcagccgcattaccttacctgtagggatgatggcgggtgcgattgagatgctggcggcaggcgtggtgttaatgatcgcgagcatgattgcgggtgaaaaactgacggcgctcccttcccttagtggcttccttgcggtcggctatctggcgctgtttggtagcattatcgccatcaacgcttatatgtatttaatccgtaatgtcagtccggctctcgccaccagctacgcttacgttaacccggtggtcgcggtcttgctgggtacgggactgggtggagaaacactgagcaagattgaatggctggcgctcggcgtaattgtcttcgcggtggtactggtcacgttgggaaaatatctcttcccggcaaaacccgtagttgcgccagttattcaggacgcaagtagcgagtaatcaagcgagtaaatgaatcccctgcgtgtcgatctgcgcgctggcaccttcgccgcagatccactcttccagacgctcggtaagcgcttcatccgtcagcttctcgcgcccacgtaacgcgcactcccagacaatcaatacgcgccagccgagttcctgcaagcgactgatatcgcggcgatcgcgctcaacatttttacctatcttctccagccagaactcggttcgagtcgcaggcactttaaacagatagcagtgatgatgatgccagaagcagccatgggtaaatatcacgcagcgatattcatcaacgacaaaatccggacgtccgggcagactggcgtcctgaacgcgaaatgccaggccctgcccggttaacagactggcgaggcgcttctctatcgccgtatcacgcgtggcaatcgcgcgcatatttttgctgcgagtggccttatcgtgaacgtcggccatgttgtgcctcttgctgacgcttagttatcgactacgtcggccatgttgtgcctcttgctgacgcaacgccaccgcctgtttgatttttggctcaagcagttttgccaccgcggcaaagaccggcacgaccacgctgttaccgaactggcgataggcctgagtgtcgctaaccggaatacggaatttcgcttctcccggcgcttcaaaacccattaagcgcgcgcattcccgaggcgttaaccgacgtggacgatgttgctgattcagcggatcgtcaaagtctttctcacccgtggccatatcccagccgcgatcgattaaaatttccgcgccatctttgtaataacgcgcagacagcgtacgcgtgacgctttgcggattgttcggataaaccattccataaccgaagccgttaccgcgcgcctgatgttttttcgcatatcgatagaggtacttccacagcaccggcgtcaggatatatttcgcctcgaccatcgggtccaacagctgcgccagcgtcactcgctgcgcagggaaacattcgctgatatcacgcagggtaaaatcggctttcagattcagatcgcgacgaaaacccaccagcacgatgcgttcacggtgctgcggcagaaaatgtttgccgtcgatgattttcggatcgtctggcccattatcttctgcatcagccacgtcatagcccagttcgtccagcgtctgcatgatgatgcggaacgttttaccctggtcgtgacttttcaggtttttgacgttttcgagcacaaacatcgccggacgacgcgcgtcgataatgcgtaccacatcaaaaaacagcgtgccctgggtatcgcaggcaaaaccgtgcgcccgcccgaggctgttctttttgcttacgccagccaggctaaatggctgacaagggaaaccggccagtaaaacatcgtgttcaggaatgtgttgacgaatatgttccgccgccgcctcatcactcacgccttctttatggctgagggtgatgtcgcggatatcttcattaaaatgatgcgtcgccggatcgcaataatggttggctttataagtgcgtaccgcatgtttgttccattcgctggtaaacacgcactgtccgccaatgctttcaaaaccgcgacggatgccgccaattccggcgaatagatcgataaagcgaaacgcataatgcggatgatgtgccggtggtttgggtaataacgtttgcagatgggcgaactctttctcacttaaacggtgccatgcgctgtcattcgccagcgcacgttttaaaattgccgcgctccagtgattctcacctacaccattaagctgcgccaccaacgttttaacatcataaatttgcagcagtttctccagcattgcctgtgcggcattcccggtgctgtaactatcggttacacttatattttcctgcatagatttcaccggccatctgagatggccgacaggttaacataattacagccatttagggccacgcgctcagccagcggaactaaacgcatctatcaccttgtgatcgacaccttcattctcccccgccagttcggcactgagcttcgccataaactcgactaaaaaatgcgcgttgtgctgcgccagctgcttgcctcttgcggtttgcatggtttgcggtagcttcagcaacttagtctggaaatgatccagcgcgtagcgtttatcatcaagcgggcgatgctgtgcgaacggatcttcaccatcaaacagcgccacgcccaatgccccactaacggcaaacacgcgcgccaggccaatcgcccccagggcttccagccgatccgcatcctggacaattttagcttccgttgttaagggggcgatttgcgcgctgaaactgtgagcggcaatggcatgacaaacggcctcgattttctccgccggaaattgctcgaactcttcacggagcaggcgacgcgtctcttctgccgccaggatactagaacgctgcctttgcggatgatttttcgccaggctcacaatatcgtgaaaataacaggcggttaaaatcaccagcatatcgacatcgtcatctgccgccagcttctgtgccgtagcccagacgcggcgaaaatgacacacgtcatgggccgcgtcctggtgctgatgatggtttttcaaccagttttcgaactgtgcctgccagtgttgtaagtccatacgcgctccgttgccaaagagtcgccaccttagcagtttttattcatagcgtctgctacgtgcgggacgaggtcgggtgtaccaggcaatgctgcctaacaatgccccgaccagagccataaataaaaatccgaccagtgcccctaaccactttcccgcggtagagcctaaatcgctttcaaatccgctcacgggggcatcgggaatccggctcatcacccagatgtaacgcgccattgcccagacgaaatagccacaccatgtatagaaagcccacaaagccagtttgccgccagggctgcgagagagtctctcttccatctttgtgctaccgtattccattttgagataacccggaaaattcagacttagtactattatgtgataaaagtcacatttttccacattggatgagccagtcaagactcaatcattttttgaacaaatagataaattttgcgcaacggcagtgaatacaggaaaaatcgttttgagcgattttatttatctttgatatcggctttattaattcatttaatcaatatattagcactgattacaattatacctttttattattctgtgtcatgatgcttccgttattagccttttatcgtcttgtttatattttttgggccggcatgatgccggctttttttatgccttcattaatgtgcgcctgatcacaccagccgtttggcgcaacaatcattgataccccctatgtttccgctcaactcataacatattgatatacatttataattttcatgaatatttatatttagaattcataattatgaattatattaaatagattagaaacattttgatatcttttaaatacatttgttacatgtaatccttaaaataaaatgaacttcatagaatagtatccaaatgtgctttttttggataacggcacttattgatatattcatgaagattataatcacaagggaatacataatgaaaagaaaagttctggcaatgctggtcccggcgttattagttgctggcgcagcaaatgcggctgaagtctataataaagatggtaataaactggatttgtacggaaaagtagtgggtctgcactacttctctgatgattctggcagcgatggcgacatgtcatatgcccgtatcggtttcaaaggtgaaactcagatcgctgatcaattcactggttatggtcagtgggaatttaacattggcgcaaacggtcctgaaagcgacaagggtaataccgcaacgcgtctggcatttgcaggtttaggctttggtcagaatggtactttcgactatggtcgtaactacggtgtcgtatatgacgtagaagcatggaccgatatgctgccagaatttggtggcgatacctatgctggcgctgacaacttcatgaacggtcgtgctaatggtgttgcaacctaccgtaacaatggcttctttggttaggtcgatggcttgaactttgctttgcaatatcagggtaataatgaaagtggtggaccattcgggcaggaaggttccggtagtggtgatggccgtagcctttccaaagaaaatggtgatggtttcggtatgtcaacatcctacgacttcgacttcggtttaagtctgggtgctgcatatcaaactctgatcgttcagatcgtcaggttggagttggtttaaatgatcgtaaccatagcaacagaaatgctggtggtgaaaccgctgaagcatggactgttggtgcaaaatatgatgctaataatgtgtatttagcagctatgtacgctgaaactcgcaatatgaccccatatggtggtggcgagtttgataatggtgaatcaagatcagccatcgctaacaaaacccaaaactttgaagttgttgctcagtatcagttcgactttggcctgcgcccgtccatcgcttacctgcaatctaaaggtaaggatttaggcggttgggctcatgacggcaacggcgacccacgttacaccaataaagatctggttaaatacgttgatattggtgcgacctactacttcaacaaaaacatgtccacctatgttgattacaaaatcaacctgctggacaacgacgatgacttctacgaagcaaacggcatcgctaccgatgatatcgttgctgtgggcttagtctaccagttctaatcagtcaactcgctgcggcgtgttactgtaaaactgaacactagcctgagttcgtccctcatcgaactcaggcttttttattggcatttcatctccatctgcggcacacgcaattgccgaagcatatcgatacagcaccttaccctgcccctcctggcacaataacatcaaccagctactcttcaagctaacacccaaatgcatttctttatgaattaatccgtaacaaacacgcttcccatatagaaatatttgcaaaaatagtgcatgaaataagctttttctctaccaatccgggatataaatattcatcagcaccacaatattccacagcactaaatctctccccgccaccccgtacctctgataatggtctaaaatcattgaagccacttgcgacgacgttgctcaataaggaaaatttggcgtgaataatattcaacaccagtgcagcatcatcattacatacttacagccgccgactaccgctttcgatatattgactcaattttccagcctggttaaaaatagcgaccagctcagtcgcaaatatagtgactaccctaactaagcaacaataaggaatacactatgactgttcaaacaagtaaaaatccgcaggtcgatattgctgaagataatgcattcttccctagtgaatatagccttagccaatataccagtcctgtctctgatcttgatggcgtggactatccaaaaccttatcgcggtaaacataaaattctggtgatcgccgcggacgaacgttatttgccgaccgataacggaaaactgttcagcaccggtaaccatccgattgaaacgttgctgccgttgtatcatctccatgctgcaggtttcgaattcgaagtggcgaccatttccggtctgatgaccaagtttgaatactgggctatgccgcacaaagatgaaaaagtaatgccattctttgagcagcataaaagcttgttccgcaatccgaagaaactcgcggatgttgttgccagcctcaacgctgatagcgaatatgcagcaatctttgttcctggtggtcatggcgcacttattggtttacctgaaagccaggacgtggctgccgctttacagtgggcaatcaaaaatgaccgttttgttatctccctttgccacggcccggcggcttttctggcgcttcgccacggcgataacccactgaatggttattccatttgcgcattcccagacgccgcagacaaacaaacgccagagattggctatatgccgggtcatctcacctggtacttcggcgaagaactgaagaaaatgggcatgaatatcattaatgacgacatcaccgggcgagtacataaggaccgtaaacttctcaccggcgacagtccttttgcagcgaatgcgttgggtaaactggcggcgcaggaaatgctggcagcttacgcgggttaatccctgttacgtttgaatgtaagcgcataatcaatcgcggccgcgttagtactcacgacgtggctgcgttttttcacggttaatttatggcgtactgaagccctatgttaatttctttgcggtaacgtaatccggaacacattatgcttattgagatagtgatacgtagcacttcccccatgcaattcggcaatcgctttgactaaagaaaggcctagtccctgacctacggaatgacggctattatctccccgccaaaatctacggaagagtttttcaggctcattaattttcgttccagggctggcgatatcaatattaagatagctgttggtatcaagaaaactggttatatgaatacggcttttttctgggctatatctaatggcattaacaataagattgcttaacattcgttgtagtaaaattttatccgcaaagatttgctgattgcactcgaccttaaagcaaatctctttctcgtcactaaggtattcaagatagtccaacaaattttcgacttccttattgagagaaaggctgtccagtttcaccaaaacattgtttttatctgccctggcaagaaacagtatgttctctgttaaccggctaatattttccagctcttcaatgtttccggcaattgttttttgatattcagcgatacttctggtttgactgagcgtaacctgattctgacccagtaatgcattaattggcgttctaagttcatgagcgagatcgtcagcaaactgacttagacgctcaaaatctttgactaaagcatgatgcattttattcaacgcctgcccaagaggttttagttctctcggtaatgcgctaacctcaacaggctctcggctatcgttataattcagcgcttccgttacaccactcaactttttgatctctcgtaatcccgttctgattaacagcggacttaatacactgcaaagtacaatggcgacaatgcaaattataatgctattaattttatactgttcaagcatgttatgtctggcactagccaatttagccacagtaaccgttaaacttgggctaacttcatcaatattaattcgtaaagcatctatctctgtatcattaataatgcttctgtaaatgccagctgcgctgattgtctcactagcaggtatgttatttaacatgccatcactgacatttgtccggttaacaattttattgatgctatcaccatgaataatcaagatatcctgactaacatccatcatccggttaaagtacacaggtaacgtatctggatttaccccatcaattaacaactgcttgatctgcgctgtccggttaatgagtgttgtatcatcgcgccatttcaactcacttgccaggccattatagagagtccagacaattccggcgccagcaacagacagtagcaatataaaaagcaaggttaaacggacggttatagatagtcttttcattatttttttaccgctacgaaactatagcccatcccccggattgtggcaattagcttttcaggaaaaggatcatcaacttttgcgcggagcctgcgaatggcgacgtccaccgtattggtatcactatcaaagttgattccccaaatttcactcgcaataaccgttctgggtataatttcgccagctctggaggccagtagccaaagtaactgaaactccttgcgcgtcagtgtaatactgatattgtccctgctcacactatgactaacagagtccattcttaagccgctgatttctaatgtactattcaaagcgtgatgttgccttaattgtgcccgaacccttgccagcaactcagaaaaactaaaaggttttaccagataatcatttgccccactgtccagccctctgactctgtcatcgacagaatcccttgcagtaaggcaaataacaggggtttgctttgctgttcttaacgtttgtaagatctgccagccatccatacccggaagcataatatccagaatgatcaatgcataatcatccttcagcgcaagataaagcccatctctgccatcagaaacggcatcgatgacataacccgcttcggaaagcccctgcgttacccattcctgggtcctttgattatcttcaataagtagaatcttcatgaaaataatatgccataaatcatatgttatagaaacagcctggttcattacaaaattgtaatgctgctgtaaggttaccctggacgctttttcgctatcctcaaaactcattcacatgacaaggatataaacatgttaaagcgttatttagtactcagcgtagcaacggcagcatttagtttaccttctttggttaatgccgcacaacaaaacattcttagcgtgcacattttgaaccagcaaacaggaaaacccgctgctgacgtgacagtcactcttgaaaagaaggcggataacggctggttacaacttaataccgccaaaacagataaggatggacgaattaaggcactgtggcccgagcaaactgcaactacgggcgattaccgtgtcgtatttaaaaccggggactatttcaagaaacaaaatcttgaaagtttcttccctgagatccccgttgaatttcatattaataaagtgaacgagcattatcatgtgcctttattacttagccaatatgggtatagtacctatcgtggcagttaatgcataaatatgtaaaagcagatctctgctactgttagggaggacactccctgacagattaacagtaaacggctcttgctggctaacgacaaaaaagtgtgatggcttatgaaaaagaatcaatttttaaaagaaagtgatgttacggccgagagcgtattctttatgaagcgtcggcaggtgttaaaagcactgggcatcagtgcaactgcactttctttgcctcacgctgcgcatgccgatctgcttagctggtttaaagggaacgatcgcccgcccgcccccgccggaaaagcgctggagttcagcaagcctgccgcctggcaaaataacctgccactgacgccagcagataaagtttccggttataataacttctatgaattcgggctggataaagccgatcccgccgctaatgctggtagcctgaaaaccgatccatggacactgaaaatcagcggcgaagtggcaaaaccattgaccctcgatcatgatgacttaacccgtcgcttcccgctggaagagcgtatttatcgtatgcgctgcgtggaagcgtggagcatggtggtgccgtggattggttttccgctgcacaaattgctggcgcttgccgaacctaccagcaatgcgaagtatgtcgctttcgaaacaatttatgcaccggaacagatgccaggccagcaggaccgctttatcggcggtgggctgaaatatccttatgtcgaaggattgcgtctcgacgaagcaatgcatccgctcacactgatgaccgtaggtgtttatggcaaggcgttaccgccacaaaatggcgcgccggtgcgactgattgtgccgtggaaatatggctttaaagggattaaaagcatagtcagtattaagctgacccgcgagcgtccgccaaccacctggaatctggcagcgcctgacgaatacggtttttacgccaacgttaatccgtatgttgatcacccgcgctggagtcaggctaccgaacgatttattggtagtggcggcatcctcgatgtacagcgccagccaacgctactgtttaatggttacgccgcccaggtggcaagcctgtatcgtggcctggatttgcgggagaatttctaaatgcgtctgacagcaaaacaggtgacatggctgaaagtttgcctgcatcttgccggattgttgccgtttctctggctggtctgggcgatcaatcacggtggactgggtgccgatccggtgaaagatattcagcattttactggtcgcactgcactgaaatttttgctggcgaccttgttaatcacccctctggcacgctacgcaaaacagccgttattgatacgcactcgccgcctgttaggattatggtgctttgcctgggcgacactgcatttaacaagttacgcattgctggagctgggcgtgaataatctggcgttattaggtaaggagttaattacccggccttatttaacgttaggtattatcagctgggtaattttgcttgctttagcgttcactagtacccaggcgatgcagcgaaaactcggcaagcactggcaacagttgcataatttcgtctatcttgtcgcgattctggccccaatacattatctgtggtccgtgaagattattagtccgcagccgctcatctacgctgggctggctgtactgcttttagccttacggtataagaagttgcgttccctttttaaccggttacgcaagcaggttcacaacaaattatctgtataacttcatattgccgacaaagtacgcgttatccctgccggatgtggcgcgagcgccctatccggcatacacagatcgcatcaggttatgtttcgtttgtcatcaacctcaaatcaccaaaataatttattttatttcaataagatagataagtagaactgagaaagccatgctctcgtttcctaagagttgttgcattttgctatatgttacaatataacattacacatcatatacattaactctggaggaaactgttttggcgattcgtctttacaaactggctgttgctttaggtgtctttattgttagcgctcctgcctttagccatggtcatcacagtcacggcaaacccttaacagaggtcgaacaaaaagctgctaatggtgtttttgatgatgccaatgtacaaaaccgaacgctcagtgactgggatggagtctggcaatccgtttatcctttactgcaaagtggcaaacttgaccccgtctttcagaagaaagcggatgcagataaaactaaaacatttgctgaaattaaagattattatcacaaaggttatgcaacagatatcgagatgattggcattgaggacggcattgttgaattccatagaaataatgaaacaacaagctgtaaatatgattacgatggatacaaaatactcacctataaaagtggcaagaaaggcgttcgttacttattcgaatgtaaagatcctgaaagcaaagcccctaaatatatacaatttagcgatcatataattgcaccacgaaaaagttctcattttcacatttttatgggtaatgatagtcagcaatctttattaaatgaaatggaaaactggccaacgtattatccatatcagttgagtagcgaagaagtggtcgaggaaatgatgtctcattgagtattctcatgataacgcctcgatgccgctttagtaagttatcataactgccactggtccatccacaaacgccactgaacgcaagctagctacagacacgctcatcactatgacgtgtctgtatattaataagctaacccgcattgagttaaccaataacggattccatacacaatacggccaacagagaaagatacctgtgctcacgccattgcttatattggctggttacaatatgcactatcaattttttaaataacaaattattaaaaccacatctgtataaggaatttttaaggttcgtgggatagcttgactgtgaaaatcacaggagctacaaaaatgaaccgattcagtaaaactcaaatttatttacattggataacgctgcttttcgttgcaataacctatgccgcgatggaactccgtggctggtttcctaaaggtagtagtacttatctgctgatgcgagaaacacattacaatgcgggtatattcgtttgggtgttaatgtttagtcgcctgattataaaacaccgttatagtgatccttctattgtgccaccgccacctgcctggcaaatgaaagcggctagcctaatgcacatcatgctttatataaccttccttgcacttcctctgctggggattgctttgatggcttacagtggaaaaagctggagtttccttggtttcaatgtgtctccctttgttaccccaaacagcgaaattaaagcactgataaaaaatattcacgaaacctgggcaaatataggctactttttaatcgcagctcacgctggcgcagcactctttcatcactacattcagaaagataatactctgttacgaatgatgcctcgccgcaaataagtcgatccccttacaaggaaatgtgaaccatggacatcaacgcgtcataaatgtttacgcaagtgcacaatgcaccctttccactatcaacaaggaggagcagaaactgtgtaaatcgtacaatggtaagacttatcaaaaatacaggttaattttggtatttaaaccttttttacttgttagtatgatacaaaggctttcaaaaaagctgcgaaattcaacaactcttggaaattatggactttgtcccgcggctttaatctgacggccgcgttccttttttgactcaattattgaacccttctctacgcaacttcagttcccaccaccaactttgcggcagtttcataggatgaatgtctaaaagaataatggtgagcgataagaaaacgactgaataactgcacattttcgctcgaaagcttcctgtcagatccatagcgaatcaagtgctgaatgtcacagtatcgaacagaaaacagtgacgatctaacccttcaagaatattctacgattgttctgtttaggaaaagaaaggcgggaagtcgggagataagtcattgataaaggttcagatggttgccatgatgccaggaaatttggcattttaacagtccctgtccgtgcaattttgttcaagtgacgagtttgcgagcaaaacgatgattaagtggccctggaaagtacaagaaagtgcacatcaaactgcccttccctggcaggaagcactaagcatcccccttttaacgtgtctgacggaacaggaacaaagcaaattagtcactcttgccgaacgttttttacagcaaaagcggcttgttcctttacagggctttgaactggatagtttaagaagctgccggatagcacttctattttgcctacccgttctggagttaggactggaatggctggatggttttcatgaagtcttaatttatcctgcgccatttgtggtcgatgatgaatgggaagacgatatcggtctggtgcataaccaacgtattgttcagagtggtcagagctggcagcaagggcctatcgttttgaactggttggatatacaagattcttttgatgcttctggttttaacctgattattcatgaagtcgctcataagctggacacccgtaacggcgatcgcgccagcggagttccctttattccgttgcgtgaggttgctggctgggaacacgatcttcatgctgcaatgaacaacattcaggaagaaatcgaattggttggcgagaatgcggcgagcattgatgcttatgcagccagcgatcctgctgaatgttttgccgtactttctgaatatttctttagcgccccagaactttttgctcctcgtttccctagtttgtggcaacgtttctgccaattttatcaacaagatcctttgcagagactgcatcacgctaatgatacagacagctttagcgcgacgaatgttcattaattaacaactttgcagattaattaaccaattgaaatgacttatgaaatttagtgttgacagacaaggtaccgctaagtaatattcgccccgttcacacgattcctctgtagttcagtcggtagaacggcggactgttaatccgtatgtcactggttcgagtccagtcagaggagccaaattctaaaaattcgcttttttagcgcaatgtcactgaccttagttgaacattgttttttaacggatagcgggtttttaacatcttaagcgccctcgacctttatggttgagggcgttttgctatgaacgccatcaccattttcccctcgattataaaacttgagttattcagtagtctcccctcttgcaactcacacccaaaactgcctaacgaaaagttattaattttcaatcatattgctatcagtatttacattttttcgctgtgctagaaagggcgcatttatgttagctcgtagtgggaaggtaagcatggctacgaagaagagaagtggagaagaaataaatgaccgacaaatattatgcgggatgggaattaaactacgccgcttaactgcgggtatctgtctgataactcaacttgcgttccctatggctgcggcagcacaaggtgtggtaaacgccgcaacccaacaaccagttcctgcacaaattgccattgcaaatgccaatacggtgccctacacccttggagcgttggaaagcgcccaaagcgttgccgaacgtttcggtattagcgtggctgagttacgcaaactcaaccagtttcgtacgtttgctcgaggttttgataatgtccgccagggtgatgaactggatgtcccggcacaagttagtgaaaaaaaattaaccccgccgccgggtaatagcagtgacaacctcgagcaacagatagccagtactagtcagcaaatcgggtctctgctcgccgaagatatgaacagcgagcaagcggcaaatatggcgcgtggatgggcctcttctcaggctagtggcgcaatgacagactggttaagccgcttcggtaccgcaagaatcacgctgggcgtggatgaagattttagcctgaagaactcccagttcgattttctccatccgtggtatgaaacgcctgataatctctttttcagtcagcatactctccatcgtactgacgagcgtacgcagattaacaacggcttaggttggcgtcatttcactcccacatggatgagcggcatcaacttctttttcgaccacgatcttagccgttaccactcccgcgccggcattggcgcggagtactggcgcgactatctaaaattaagcagtaacggctatttgcgactgaccaactggcgcagcgcacctgaactggacaacgattatgaagcacgcccggccaatggctgggatgtacgcgcagaaagctggctacccgcctggccgcaccttggcggtaaactggtctatgaacagtattatggcgatgaagtggccctgttcgataaagacgatcggcaaagtaatcctcatgccataaccgctggacttaactatacccccttcccgctgatgaccttcagcgcggagcaacgccagggtaaacagggcgaaaatgacacccgttttgccgtcgattttacctggcaacctggcagcgcaatgcagaaacagcttgacccgaatgaagtcgctgcacggcgtagccttgcaggcagccgttatgatctggtggatcgcaacaacaatatcgttctggaatatcgcaaaaaagaactggttcgcctgaccctgacagaccccgtgacagggaagagtggagaagtgaaaagtctggttagcagcctacaaaccaaatatgccctgaaaggctataacgtcgaagccaccgcactggaagctgccggtggcaaagtggtcacaacgggtaaagatattctggttaccctgccggcttaccggttcaccagtacgccagaaaccgataacacctggccgattgaagtcaccgccgaagatgtcaaaggcaatttgagcaatcgtgaacagagcatggtggtcgttcaggcacctacgctaagccagaaagattccagcgtaagcttaagtacccaaacattgaacgcggattcccatagtaccgccacactgacttttattgcgcatgatgcagcaggtaatcctgttgtcgggctggtgctcagcacgcgtcacgaaggtgttcaggacatcaccctttctgactggaaagataatggtgacggaagctatacccagatcctgaccacaggagcgatgtctggcacgctgacgctgatgccacagctgaatggtgtggatgcggctaaagcccccgccgtggtgaatatcatttctgttagcagttcccgaactcacagcagtattaagattgataaggaccgttatctctccggcaatcctatcgaggtgacggtagaactgagagatgaaaatgacaaacctgttaaggaacaaaaacagcaactgaataacgcagtcagcatcgacaacgtgaaaccaggagtcactacagactggaaagaaaccgcagatggcgtctataaggcgacctataccgcctataccaaaggcagtggacttactgcgaagctattaatgcaaaactggaatgaagatttgcataccgctggatttatcatcgacgccaacccgcagagtgcgaaaattgcgacattatctgccagcaataatggtgtgctcgccaatgagaatgcagcaaacaccgtcagcgtcaatgtcgctgatgaaggaagcaacccaatcaatgatcataccgtcacgtttgcggtattaagcggaagcgcaacttccttcaacaatcaaaacaccgcaaaaacggatgttaatggtctggcgacttttgatctgaaaagtagtaagcaggaagacaacacggttgaagtcacccttgaaaatggcgtgaaacaaacgttaatcgtcagttttgtcggcgacagcagtactgcgcaggttgatctgcagaagagcaaaaatgaagtggttgctgacggcaatgacagcgtcacaatgaccgcgaccgtccgggatgcaaaaggcaacctgctcaatgacgtcatggtcactttcaatgttaatagtgcagaggcgaaactgagccaaaccgaagtgaatagccacgacgggatcgccacagctacgctgaccagtttgaaaaatggtgattatagggttacggcctctgtgagctctggttcccaggctaatcaacaggtgaattttatcggtgatcaaagtactgctgccctgaccctcagtgtgcctagtggtgatatcaccgtcaccaacacagctccgcaatatatgactgcaaccttgcaggataaaaatggcaacccactaaaagataaagaaatcaccttctctgtgccaaacgacgtcgcaagtaagttcagcattagcaacggaggaaaaggcatgacggatagtaacggggttgcaatcgcctccctgaccggcacgttagcgggcacgcatatgatcatggctcgtctggctaacagcaatgtcagcgatgcacagccaatgacgtttgtggcggataaagacagagcggttgtcgttttgcaaacaagcaaagcggaaatcattgggaatggcgtggatgagacaactctgacagcaacagtgaaagatccgagcaatcatccggtggcggggataacggtaaacttcaccatgccacaggacgttgcggcaaactttacccttgaaaataacggtattgccatcactcaggccaatggggaagcgcatgtcacgctgaaaggtaaaaaagcgggcacgcatacggttaccgcaacgctgggtaataacaataccagtgatagccagccggtaacatttgtggcggacaaagccagcgctcaggttgtcctgcagataagtaaagatgagatcacaggtaatggcgtcgatagcgcaacgctaactgcaacggttaaagatcagttcgacaatgaggtgaataatcttccggtaacattcagcagtgcctctagtggactcaccctgaccccgggagtaagtaataccaacgagtctggcatcgcgcaggccactctcgcaggcgttgcctttggtgagaagacggttactgcaagtctggctaataatggtgccagcgacaacaaaactgtgcattttattggcgacacagcggcggcaaaaattatcgagttggcgcctgtcccagacagcataatcgccggtaccccgcagaacagctccggcagcgtcatcaccgccacagtcgttgataataatggctttccggtgaaaggtgtgactgtgaacttcaccagcaacgcagcgacagccgaaatgacgaacggcggtcaagccgtgacgaacgaacagggtaaggctaccgtcacttataccaatacccgctccagcatagaaagtggagcgagaccggataccgttgaggccagtctggaaaatggtagctccacgcttagcacaagtattaatgtcaacgctgatgcgtctacggcacatctcaccttgctacaggcactttttgatacagtctccgcaggcgagacaaccagtctgtatattgaggtgaaggataattacggcaacggtgtcccccagcaggaggtaaccctcagcgttagtccaagtgaaggcgtgacccccagtaataacgctatatatactaccaaccacgacggcaatttttacgcaagctttaccgctacaaaagccggggtttatcaattgacggcaaccctcgaaaatggcgatagcatgcaacaaacagtgacctatgtgccgaacgtcgcgaatgctgaaatcacgctggcagccagcaaggatccggtgattgccgacaataacgatctcacgacactaacagcaacagtcgctgatacagagggcaatgcgatagccaacactgaggtaacatttactctgccggaagatgtgaaggcgaacttcacgctgagcgatggcggtaaagtgattactgatgctgaaggcaaagcgaaagtcacgctgaaaggtacaaaagcaggcgctcatactgttacagcaagcatgactggcggtaagagtgagcagttggtggtgaactttattgcggatacgctcactgcgcaggttaatcttaacgttaccgaggacaattttatcgctaataacgtcgggatgaccaggctgcaggcaacagtgactgatggaaacggcaacccgttagccaatgaggcggtgacattcacgctaccggcagatgtgagcgcaagctttactctcggacaaggcggttccgccattactgatatcaacggcaaggctgaagttacactgagcggtacaaaatccggcacctaccccgtgacagttagcgtgaacaattatggtgtcagtgatacgaaacaggtgactttgattgccgatgctggtaccgcaaaactagcctccttaacctctgtatacagtttcgtcgtcagcacgaccgagggcgcaaccatgacggcaagcgtcactgacgctaacggcaacccggtagaaggcataaaagttaatttccgcggaacctccgtcacgctaagcagcaccagcgttgaaacggatgatcggggtttcgctgaaattcttgtgacaagcaccgaggtcggactgaaaacagttagtgcctctctggcagataaacctactgaagtcatcagccgattactgaatgccagtgcagatgttaattctgcgacgattaccagtctggagataccggaaggtcaggtaatggtcgcacaagacgtagcagttaaagctcacgttaacgaccagtttggcaacccggttgcgcatcaacccgtgacattcagtgcagagccatccagccaaatgatcatcagccagaatacggtctctactaatacgcagggtgtagccgaggtcaccatgacgcccgaaagaaacggtagctatatggtgaaagcatccctgccgaatggagccagtcttgagaaacaactggaggctattgatgaaaaactgacactcacggcgtccagtccgcttatcggtgtctatgcccctacaggcgctactctgacggcaacgctaacctctgcaaatggcactccagtggagggtcaggtcatcaactttagcgtaacgccagaaggggcgacgttaagtggcggaaaagtgagaactaactctagtggtcaggctccagtcgttttgaccagcaataaagtcggtacatatacggtgactgcatctttccataacggcgtaacaatacagacacagacaaccgtgaaagtcactggcaacagtagcaccgcccatgttgctagctttatcgctgatccaagcactatcgccgccaccaacactgatttaagtaccttaaaggcaacggttgaggatggcagtggtaacctgatcgaaggtctcactgtgtacttcgccttaaaaagcggctctgccacattaacgagtttaacagcggtgaccgatcaaaacggaatcgcgacaacaagcgtgaaaggagcgatgacaggtagcgtcacggtaagcgcagtcacgaccgctggtggaatgcaaacagtagatataacgctggtggctggcccggcagacaccagccagtccgtccttaagagcaatcggagtagtctgaaaggggactataccgatagtgctgaattacgtcttgttctgcacgatataagtggcaatccgatcaaagtttctgaagggatggaatttgtgcaaagtggtactaacgtgccctatataaaaattagcgcaattgattacagtctaaatatcaacggtgattacaaagccactgttacaggaggcggagagggtatcgcaacgctgatccctgtattgaatggtgttcatcaagctggtctgagtaccacaatacaattcactcgcgcagaagacaaaataatgagcggtacagtaagtgtcaatggtactgacctaccgacaactacattccctagccaggggttcaccggggcgtattatcagttgaataatgacaactttgccccaggaaaaacggcggctgattatgagtttagtagctctgcctcctgggtcgatgttgatgctaccggtaaagtgacatttaaaaatgtcggcagcaatagcgaaaggattacggcgacgccaaaaagtggaggccctagctatgtatacgaaatccgtgtgaagagttggtgggtgaacgccggcgaggctttcatgatatacagccttgctgaaaatttttgcagcagcaatggctacacgctccccagagcaaactatttaaaccactgtagttcccgaggcatcgggagtctgtacagtgaatggggagatatggggcattacacgactgacgctggttttcaaagtaatatgtattggagttctagtcccgcaaacagtagcgaacaatacgtagtttccctggcaacaggtgatcaaagcgtatttgaaaagcttgggtttgcttatgcgacatgttataaaaacctgtgattttccgttataatttcttaaagagtgttccattcggggcactcttttttacattccctctacagaactagcccttctctcacagaaaatgaataaataaaaatgcggcaccgccagaatcgcgttcgatgtgactatgatcattttcggtgagtactgctttgatctaaaggctggttttctgtgatgattgaccagcctcagagtattgatgacaccaccgttcataacagatcggcattactatgcataagtactgtctcatattctcgccaaaacactttttaatgcctttgcgaattcatccagacttatattgtcaattttttgcccaacgacgactgactccgagacatcggccattgcgggccatcgcgttttgtaatcagcataaattgcaacaacaggggtattataggcacttgccatatgtaatattgaggtgtcaggagttattgcgatataagcatcttttatgattgctgctgaacgtttaatcgagggtggtaaggataaacggtagacattattataacaatccactaatgccctggctttatcttcacctttgggtccatgaacgatcactattggtatatctgtttcactttaaatttttgctattagattttctgcaatcgataatgaaaatgtacgttcctgcgagctaccttctaaattgaacgcaatgtaagatcctaacgatcgcatttcctcgcgcacctcatcgagtacatcctcacttagtggcaattcatatattggcctgactgctggaaaacccgcctcacgcatcataaatgcccatgtcataggtacgggagcccggagtttctgatccatactggacgcgttcttgcacaaaggggagaagcaattcatggttataccaacaacctgaaaattcgtttttgctttcaactgactgataaataacatcgttttcaggttctttttacgcatcccctcaatgcaaagatccggcgtaccgtattgctgtgttatgttctttgctaaatcttttatttcttttaatgttgcgtgatcctgcatagtcattgtgactaatgttaatttagtctgttcaagtttaagcgcattaaagacttctaaattaattgtcgacgttacaattaaaagatgcttaattttatgcaattcaagcgcccgaataacaggaaagatggccatagcatcgccaatctgatcgggaatatggatgacaacaaagtctgttttttcaatattgaaattataagctttataatcgtagtaactaaatgcaatacgtctcaacaatgatgctaaaaacatacctaacctcgcctccctactggttataatgcaatgcagtctatcagactcatcagggtgccattttgtgcatatgcggacttttatgtttcatatctctaacctgtgggtcctctgcttaatccttaaacaacaccagcaactcctgcgctttcatcttccatcgaatttttcatgttgccgctaatcagccataaaatcatttgcagatgcgctctgtcgaggtagtctcataaggttcgtttatagatcgacggcaatgtgagttaccttttccatactaattataaaaagacagtacaaacaggatcattatggactccacgctcatctccactcgtcccgatgaagggacgcttagcttaagtcgcgcccgacgagctgcgttaggcagcttcgctggtgccgtcgtcgactggtatgattttttactctatggcatcaccgccgcactggtgtttaatcgcgagtttttcccgcaagtaagcccggcgatgggaacgctcgccgcatttgctacctttggcgtcggatttcttttccgtccgctcggcggtgtcattttcggtcactttggcgaccgactgggacgtaagcgcatgttaatgctgaccgtctggatgatgggcatcgcgacagccttgattggtattcttcctagtttcagcaccattgggtggtgggcacctattttgctggtgacactgcgtgccattcagggatttgcagtcggcggcgaatggggaggcgcggcgttgctttccgttgaaagtgcaccgaaaaataaaaaagccttttacagtagcggtgtacaagttggctacggtgtaggtttactgcttagtaccggactggttagtttgatcagtatgatgacgactgacgaacagtttttaagctggggctggcgcattcctttcctgtttagcatcgtactggtactgggagcattgtgggtgcgcaatggcatggaggagtccgcggaatttgaacaacagcaacattatcaagctgccgcgaaaaaacgcatcccggttatcgaagcgctgttacgacatcccggtgctttcctgaagattattgcgctacgactgtgcgaattgctgacgatgtacatcgttactgcctttgcacttaattatagtacccagaatatggggctaccgcgcgaacttttccttaatattggtttgctggtaggtggattaagctgcctgacaattccctgttttgcctggcttgccgatcgttttggtcgccgtagggtttatatcacaggtacgttaatcggaacgttgagcgcatttcctttctttatggcgcttgaagcacaatctattttctggatagttttcttctccataatgctggcaaacattgcgcatgacatggtggtgtgtgtgcaacaaccgatgtttaccgaaatgtttggtgccagttatcgctatagtggcgctggagtcggttatcaggttgccagtgtggttggcggtggatttacaccttttattgccgctgcactcatcacttactttgccgggaactggcatagcgtcgccatttatttgctggctggatgcctgatttccgcaatgaccgctttgttgatgaaagacagtcaacgcgcttgatagcctggcgaagatcatccgatcttcgccttacacttttgtttcacatttctgtgacatactatcggatgtgcggtaattgtatggaacaggagacacacatgaataataagggctccggtctgaccccagctcaggcactggataaactcgacgcgctgtatgagcaatctgtagtcgcattacgcaacgccattggcaactatattacaagtggcgaattacctgatgaaaacgcccgcaaacaaggtctttttgtctatccaagtctgaccgtaacctgggacggtagcacaaccaatccccccaaaacgcgcgcatttggtcgctttacccacgcaggcagctacaccaccacgattactcgccctactctctttcgtagctatcttaatgaacaacttacgttgctgtatcaggattatggtgcgcatatcagtgtgcaacccagccagcatgaaatcccttatccttatgtcatcgatggctctgaattgacacttgatcgcagtatgagcgctgggttaactcgctacttcccgacaacagaactggcgcaaattggcgatgaaactgcagacggcatttatcatccaactgaattctccccgctaagccattttgatgcgcgccgcgtcgatttttccctcgcacggttgcgccattataccggtacgccagttgaacattttcagccgttcgtcttgtttaccaactacacacgttatgtggatgaattcgttcgttggggatgcagccagatcctcgatcctgatagtccctacattgccctttcttgtgctggcgggaactggatcaccgccgaaaccgaagcgccagaagaagccatttccgaccttgcatggaaaaaacatcagatgccagcatggcatttaattaccgccgatggtcagggtattactctggtgaatattggcgtgggaccgagtaatgctaaaaccatctgcgatcatctggcagtgctacgcccggatgtctggttgatgattggtcactgtggcggattacgtgaaagtcaggccattggcgattatgtacttgcacacgcttatttacgcgatgaccacgttcttgatgcggttctgccgcccgatattcctattccgagcattgctgaagtgcaacgtgcgctttatgacgccaccaagctggtgagcggcaggcccggtgaggaagtcaaacagcggctacgtactggtactgtggtaaccacagatgacaggaactgggaattacgttacagtgcttctgcacttcgttttaacttaagccgggccgtagcaattgatatggaaagtgcaaccattgccgcgcaaggatatcgtttccgcgtgccatacgggacactactgtgtgttagtgataaaccgttgcatggcgagattaaacttcccggccaggctaaccgtttttatgaaggcgctatttccgaacatctgcaaattggcattcgggcgatcgatttgctgcgcgcagaaggcgaccgactgcatagccgtaaattacgaacctttaatgagccgccgttccgataataagttctgaaccttcttatcagaaatagatgtgaaggagtaagtaagacacctggcaaatagcctgcaataatcgtgggctgtttgcttccttgggcggatacgagttttattatcgtcttaatgatttccacatattaaaagcaagtatgctttcaaaacacaattataaaaaatcccgccaacaatataagtttttataaaattaaatataagattatggctttagaatatttttatttctaatagacgagatttttcctgttatgatataatatgctgaattaacacatgttaacgatttaccagtaatgtaaataaattttcgaggagatcattccagtgggacgtaaatgggccaatattgttgctaaaaaaacggctaaagacggtgcaacgtctaaaatttatgcaaaattcggtgtagaaatctatgctgctgctaaacaaggtgaacccgatccagaattaaacacatctttaaaattcgttattgaacgtgcaaagcaggcacaagttccaaagcacgttattgataaagcaattgataaagccaaaggcggcggagatgaaacgttcgtgcagggacgttatgaaggctttggtcctaatggcagtatgattatcgccgagacattgactagtaatgttaaccgtacgattgctaacgttcgcacaattttcaataaaaaaggcggcaatatcggagcggcaggttctgtcagctatatgtttgacaatacgggtgtgattgtatttaaagggacagaccctgaccatatttttgaaattttacttgaagctgaagttgatgttcgtgatgtgactgaagaagaaggtaacattgttatttatactgaacctactgaccttcataaaggaatcgcggctctaaaagcagctggaatcactgagttcagtacaacagaattagaaatgattgctcaatctgaagttgagctttccccagaagatttagaaatctttgaagggcttgttgatgcccttgaagatgacgacgatgtacaaaaagtttatcataacgtcgcaaatctctaattatcttttaaagaaatctgtctttacggcagatttctttaatctcatataattcttataaaaaatataatattcaactcgtcatattgattatacccccccgttcccagagaaataatatttattaaaattccagttcttctttttctgattacagaaggcaaagtggcaattacgcatagtttcccgataaagacgcgatagcgacatcccgcataaggcatttttctctttatctttgtacggtacttcatggaacagagtttttgaccttgcgaatcgtgatgtctgttggggagggacaatttgctcactgaagcgtgagactcgattaagcgcacgaaacacagaaatcaaaaaacccggtcacttttttacaaggtaaccgggtaaaaataatttttattttttaactgttttgagactcatagagatgtctcaaaactaaaatttggctcctctgactggactcgaaccagtgacatacggattaacagtccgccgttctaccgactgaactacagaggaatcgtgagaacgaggcgaatattagcgatgcccacccacaatgtcaaagcctgttttttaaatttgaaatcgtttgctgaaataatctgcattttgtcgtttattcgctcacaactggctttttttcacacttttgcggctcgggtcgagggtatttccatagccaacgtccagtaaccattcgccagtaaaacagcacggcccgcacagcccagtcggcaaacattcccatccagacaccaaccacaccccagccaagcatgattcccagcacataaccgactacaacccgacaaccccacatgctcaacatgctaacccacatggcgtaacgggcatcacgagcacctttaaatccagcgggtagcacccaactggcggaccaaataggcataaataaagcatttagccaaatcagaatcacaacgacatgtttaacctgtggatcctgggtgtaaaagcttgccataaccccggcaaagggagccgttagccaggcgatggccgttaatccaagagtggaaagccagaacacatgccgcaactgaatctctgcttgcgctatctgccctacccccaaccttcggcctgtaatgatcgtagaagcagagccgagcgcacttccgggtaagttgataagagccgcaatactaaacgcgataaaatttccggcaataacactggtccccatcccggcaacgaacatttgggttaataaccgaccactggtaaataacacactttcgacactcgcgggaataccaatccccatgacttcccagataatgctaaaattcagcggtttaaaatagctctttaagctaatccttagcgcaggattaaaaccaatcgccagcacccacaaaattgcaactgcgccaatataacgagaaatggttaaacccagccctgccccgacaaatcccagtcccggccaggagaaaaggccgtaaatcaatatgccgctaataataatattaagaatattcaggctaccgttaatcaatagcggtattttcgtattccctgcaccacgaagtgccccgctaccaataagagtgatggcagctgctggataactgagtaccgtcagctccagataagtcaacgccagtgctttaacttctgtcgtggcatcacccgcgacgaaatcaataatttgttcgccaaaatgatgaataagcgttgccaacagtacggcaaacaacgtcatgatcaccaaactctgccgcgtcgccaccctcgctcgtcgtcgatcccgcttaccgagactaaatgccacaacgacagtagtaccaagatcgatagcagcaaaaaaagccataatgaccatattgaagctgtccgccaatcccacgccggccatcgcatcttttcccagccagctgaccagaaaagtgctcagaacccccatcaacaggacacaggcattctccatgaagataggaacagcaagcggggttatctcgcgccagaacaacactttgtagctcttgcgtttagcgtgccagcgagtgccgtgaacaacctggcgtaaagcagaggagatattcaaagcgctccttaattgcagaaagtgaaaccacatttcaaataaactgggagaatcagcaaagctgcaaagattttcgccaacaaattgtctgcaaatgcaacaaactgtacttagaaacggcaaacagttggggaatttaaaaatcgggttactcaaaagatttttcgccgttaagatgtgcctcaacaacgattcctctgtagttcagtcggtagaacggcggactgttaatccgtatgtcactggttcgagtccagtcagaggagccaaattcctgaaaagcccgcttttatagcgggatttttgttatatctgataatcaatttcctcttcactgctttccatcacctgccgcttgatatcctcaacactcagtcctgcattacaaagttccagaaagcgccagacatagttacgctgaagttgtcctcgcttcagtcccaaccagacagtattagcatcaaaaagatgccgcgtatccaggcggattaaattctcttcctcttgttcgccactggattgctcggcaactaatccgatcccaagcccaagagcaacataggttttaatgacatcagaatcctgcgcacttaatacaatatctgccagcaaacctttgcgggcaaatgcgtcatcaatacgactgcgccccgtaatcccctgtcggtaagtgattaacggccacttcgctatactttccagcgtcaatggactaatttgcgtcaagggatgatcgtgtggaacaagcaaactatggtgccaacgaaaccacgggaaggcgacgagctgcgggtcattactcaaacgctcgctggcgataccaatatcagcttcgccattttgcaacaatgtcgcaatttcctgtggcgtcccctggattagctcgagccgaacctccgggaaaagttcgcgaaaagctttaatgacctctggcaagctataacgtgcctgagtatgcgtcgttgcaatagtgagaacgccagacgtatcgttggtaaacaggtctgcaagccgacgaacattactggcttcattcagaatacgttctgcaatgaccagtaatgctttgcccggttcagtcatgcccagcagtcgcttacctcgtcgaacaaatatttcgatgccaagttcatcctccagttcccgaatatgacggctgacgccactctgactggtaaaaagcatattcgcaacctctgtcaggttgtaatcctgacgtgcagcctcgcggattatctttagttgttggaaattcacggtaaactccgggcagttcagatttcccgttattgttaaagtctaatgcccggcataacaaataataaaaacccgcatcttattccatcccgatataacacttagctcaccaattgccactgccttttttccatcactggagaactaatcacactcattaacaactctttcactgcctgtgcctgtgggcttaagttcgctctggcgggtaaatttaaactcaaagagagactcatggaaggagtggtaatgcgactcatccacccatttactgcgccacataagctacgcgcggcgctttcgggtaatactgcaacgcccatgccgctggcaatcgctgcggtaagcgtggcaatagactcaatttcaccaataacttttgccgtgagtcgccgtagggaaaaagcctcatcaacacgaagtctaatagcactgtaatcactggggagaaagaggttcatttgcgcaatagcattcacatcaacgctttgccccgggcaatcttgagttcctaccagaaaaagatcttctttcagcaaagcctgactggatacaccagccacaggggaatgctcataaatcaccgccatatcgagttggtgatttatcaatttttcgttaagcactgcaccactattttcatgaagatagataacgatctccggaaattcagcgcgaaccgcctgtaataagggcatggtgatggaactcgcagcggttcctggtgcaaagccaatgctgacttgcccgcttaatgcctgaccaacgttatgcaccgccagttgggcctgttcacactgacgtaaaatggcccgcgcatgggtatagagaatttttccggcgtctgttggtgtaacgccccgctttgtacggatcaaaagttgttgatttaactcaccttccagtgtggcaacctgctggctgagcgctggttgtgcgatatgcaatacttcagcagcctgggtcaggctaccaatatctacaatttttacgaagtatttcaggcgtctgaagttcatgttgcctccggtttttaagaatcggcccaagtgccgccattacttacaaccagattgcaagatgcttgccagttttattttggtgttgatgtacaagctaaccaactgtcaaataagagattatgatagattcgtcatttgctcctttaatcagctgtcgcgttcccctgccctataaaaggagggtatgcaccacgatggttcattacccaataagattgaaagctcaccactttgttgaaattgacagcaaacaaacaaaaaaatgcatttcaccctttgacatcaccatgcactgccattaatatgcgccccgttcacacgattcctctgtagttcagtcggtagaacggcggactgttaatccgtatgtcactggttcgagtccagtcagaggagccaaattcaaaaaagcctgctttctagcaggctttttgctttctaattaccaacgctcttaaaacatctgtctactaccagaactaatttgcacaggcattccgcttcgacgttgcaacgcagcatttgcgcgatttacatcaacttcttgcccgttgataaacgcccgcaaagatggggttaccggcaatggcacttttcggtcagactcatattctgcacgattgcggctcaatggctcatgaacttccagccagttgctgccatctggttcagtggtgtattttactggctggtcgataatttgcacacgcgtcccaacaggaacattatcaaacagatatttgatatcgtcattgcgcagacgaatacagccctgacttacccggagcccaataccaaaattggcattggtaccatggatggcatacaacctgccaatataaatcgcgtacagccccatgggattatcggggcccgcaggaacaaatgcgggcaaactctcccctcgtttcgcatattcgcgccgagtgttcggcgttggcgtccaggttggagcttcttgtttacgttcaacggtagtcacccagttacgcggggtttctcgcccagcctggccgataccaataggaaagacttccacagtattactgtctggtgggtagtaataaagacgcatctcagcgacgttaacaacaatccctttacgaacagtgtcgggcaaaatcagttgctgcggaatggtgagttggctgccagacttcggcaaaaaaacatcagcgcccgggttcgcttccagcatgttacttaacccttgcccgtattgtgcggcaaaagtctccagcggctgggtattgtgatcaggaacagttacagtaaagctctgccccactaaacggctaccctctggaggtaatggataagttaccgccaggctagtatggctggcaaaaagcagagcaaaactgcaaagaatatttacacgacgcatcatgtccctttcctatgtcgcgaaagctatccgttaagtatagcttttatcagacttttcgtttttaactgttcaaatcagaagtcgtattccccggtagaacaatattactggcagcaagttcgcccatgttgttgtatatcgcacaggcagcttcgatgatgggcatcgccagagctgcgccactcccctcacctaaacgcatctccatattgagataaggctccagccccaaatggctgagcgctatacgcgcgcctttttctgcgctcaggtgagaaggaatgagatacggtttgatcgcaggagacatctggcaggctgcgagcgcagcagcataagaaagaaatccatccagcaacacgggtaaaccgcaggaagcagcacctaacatcactccagctattccgaccaaatcaaatccacccacttttgccaggacatcaacaccatcctgaggatttggttgattcaacgtaatcgcccgacgcacaacatcaattttattagccagtttatctgtcggcaggtttgcgccaatcccaaccacttcttcaggatcccggccagtgattgtgctgactattgctgctgccggtgtcgtgtttgccatccccagttcacctacaccaaacagcgtgacaccgttttttgccagctcctgcgtataacatatgacgtccaaaagcaacttttcagcctgacggcgactcattgccggagcactagcaatattgccgctacctcgtgcgacacgcatgttgataagcccggggataggctcagcagtatcaataccaacatcaattacgtggacgttagcgcccgcttgttctgccagcacacacacgccggttgttccacgggtcatattttcagcctgtatggctgtcacttcttttggagaaatagcgaccccttcctcccagacgccgtgatcggcacacataaccagtaccgcttttttgcccacatgcggtatgccattcaaccccggcattcctgccagttgtatggcaagcacctccagctttcccaggctaccaacaggtttgagtaacccgtcaatatgccgttgtgcacggctcatagcggtagaatcgatggctgggatcgtattcagtaaatcggcaagtatttgcatctcacgtctctttatagcagtgccagcaggaagaccagttcaccaagctctatggctgctcccagcgtatcgcccgtttgcccgcccagcgtacgtttgagaagctgaccgaggatgaaaatcgccaccatcgtcaccaccatagcagccacaccatgcatacccggcaataatacggcagcaaaaatagcggctaagccgagtgtgacgcaggtttgtcgcccatcaattttgccaatgaacacattgccaagcccttcttcccgcgcataacgatgacgatacatcaataatgcggcagtcccgcggctgaccgcacatgctgccgccaggcttgcaaggatgctttcgccacgcagagccaactcgcttaacaccagaatctttgccagtaccacaaaaatcaatgccagaccgccgtgggtgcctaaacggctatcacgcatgatttccaacatgcgatcgcggctacgtgcagaaaatacgccatcacaggtatcagcgaggccgtccagatggaatcccccggtcatcagcaccagcacaagtacgctaaacagtgccgccagtggtgcgccacaccatgcctgcagcaccatgaagaccagcccgctaatcgcgccaagcaataatccaatcaaaggaaaagtaataataccgcgagaataatgctcgaaatccagtccctgggaccagcgacgcggtacaggcagacgcgtaataaaactgagcatcgcccaaaataatttactcatttgatttttactccaataccgctaaccaccagccatacttcatttgccgcagcggccaactgctgatttacccgcccggcaatatcacgaaaatgtcgtgccagacgactctccggcacaatccccattcccacttcgttagtcactaatacaacctttgcggggcaacgttggcaggcagcaatcaagctctgaatctcagcattaatcgcctgttccatcgcctgataatcccattcatcagggtctttatcgccgccataatcaaacaacagattagtcaccattgtggtaacgcattcaagcaacacaacctcattcgggttaatgtctgcatgaattaattcatcaagatgttgccagcgctccactgtgcgccagtgctccgggcggccttgccgatgatgttctatccgtgcagccatctcatcatcaaggatttggctggtagcgatatacagaacctgactagagtccccaataagcgcctctgcgtggcgactcttcccgctccgtgcgccccccgtcaccaaaatcatcataccgactcctgattcaaatgtatgatggtattcattgaacagaacaatggatcccccaccgttgctgaccgcaaaacatttacgcgattaatactgcgcgtaatataattaaaaatccagcattctcaatccattacgaaataagatggcattacggaatagccagactttctcgtgttaacgtccgacaaaatgcgtcattgacagcggtttctgtggattgacacatttcattcagataatgaattaatgctactgccggaacaaccagcaaacgggcattgtgttctgaaatccaggctattgattcaacgtcagcgacagatctgcgctgtaaaagaacttgtaaaacaacgtaatagaattatccggaatggtggcgactatgcactagggaaggtgcgaataagtggggaaattcttctcggctgactcagtcatttcatttcttcatgtttgagccgattttttctcccgtaaatgccttgaatcagcctatttagaccgtttcttcgccatttaaggcgttatccccagtttgcagaaactccgtaatgagattaaaagcgctcataactcatctgtcggccagaaggcgcgcctctgaattatccgacggacaaaccgggaacagtgtaatttcccggcaggagcgaaaaaattgaaaggcgcatcttactcttttcgctttcaaaaaaaagagtggtcatcgcgttaacacaccgccctgagatgaattagtgatgttttggctgcaccgcaacatacatttcgatatcccagtacccatcttccgcgccattgttcaaataaacctcgaagcagggctttggtaacatttcataagcactgtcctgcaagagactattaaagaactgataccagggtttagcaaaatcatcaccgactacacgagctaccgccaccgcatactgaccacctgtaatttctgtcagaatgacgccctcactgttttcgggaagcgtaaagtaacccggcaccgtcacgacggtgtcgcagcgtaatttttcggcgggtgtttcatctggattgtcgtaatagacagcaacccactccttcggcacaatatttttgctatctacccacatcatcaactgctcaaagcctttctttaccgtctgttcccacgggccaacgagatggaaacctgcaacggtacgtttctcttcctgcttaatctcgtagttcatgacgcctccattgatactgtttttatatacagtatagttgcaaaattaaaaccacaaggaatgagtgttgattatgcgagcagactcgcactcctgccagtctgctgcaaaagaaaggtcaggccttatggtggaaataatcactcaggcgagaaaacatgctgccttccccgacagattccagggtaaccagcggccagtgcgccacctgtttatcacggtcgtaaagttcaatttcccctacccgctgatgggcgctaattggcgcggtgagttctttaccatcaagggtatatttggctttgatatgtggaatttcggctttcggtagcaccatccagaactcttgttccgttcccaggtcgatattttctttatcgccataccagatgcgttccgttccgacctttttcccacggtgcaaaatttgcaccgtagtaaagttttgttgcccccaacgcagtaattttcttgcctcttcctcacgaccttttgcactgtcagcccccattaccactgcaatgagacgacgctgcccatctacagcgctagcaatgagattaaacccggcaccagaagtatgacccgttttcaggccgtcaacattcatggttttatcccacaacaacccgttacggttttgctgggtgataccgttccaggtgagacttttctcactgtacatatgataaaactcgggctcgccgtggatgatagcacgagaaagcacagctaaatcataagcgctgctatgctggccaggtgcatccagaccatgcactgtttcaaaatgcgtatccttgagatgcagcttctcggcatagttgttcatcatttcaacaaactgccgttgcccaccggcaatatagtcagccagagcaacacaagcgtcatttccggaatccacaattaaaccacggcttaaatcacgtacgcttacgcgatcgccctctttcaaaaacatcagactagaaccgacaaacaccggattatctttcgcccacgcatcgcgccccacggtgacaatatcgtctggcgtaatgcgatgactatcgatagcgcgatccacgacataacccgtcatcagctttgtcaggctggcgggattgcgctgttgatgctcattacccgcggtgaggatctgaccggtggtgtaatccatcaatacccaggacccggcatgaatctctggaggctgaggactaaaaggaatgttttccgccgcaaaaccagagcttaagttaaaaacgaacaaagaagcagcaataataagacggcgtttcaacagcaaaccctcaggagtttcaaatagctgttctttttacggaaatacttatgaactggctggaataaagtgcaagaaaatgtgactaccctctcatttttatctgacatgatctgttgccactcgctgccaaattgtggcgctaaagctgattagcacggtgatatttgatactctggcagacagcagaaataacggatttaacctaatgatgaatgacggtaagcaacaatctacctttttgtttcacgattacgaaacctttggcacgcaccccgcgttagatcgccctgcacagttcgcagccattcgcaccgatagcgaattcaatgtcatcggcgaacccgaagtcttttactgcaagcccgctgatgactatttaccccagccaggagccgtattaattaccggtattaccccgcaggaagcacgggcgaaaggagaaaacgaagccgcgtttgccgcccgtattcacagcctttttaccgtaccgaagacctgtattctgggctacaacaatgtgcgtttcgacgacgaagtcacacgcaacattttttatcgtaatttctacgatccttacgcctggagctggcagcatgataacagccgctgggatttactggatgttatgcgtgcctgttatgccctgcgcccggaaggaataaactggcctgaaaatgatgacggtctaccgagctttcgccttgagcatttaaccaaagcgaatggtattgaacatagcaacgcccacgatgcgatggctgatgtgtacgccactattgcgatggcaaagctggtaaaaacgcgtcagccacgcctgtttgattatctctttacccatcgtaataaacacaaactgatggcgttgattgatgttccgcagatgaaacccctggtgcacgtttccggaatgtttggagcatggcgcggcaataccagctgggtggcaccgctggcgtggcatcctgaaaatcgcaatgccgtaattatggtggatttggcaggagacattagcccattactggaactggatagcgacacattgcgcgagcgtttatataccgcaaaaaccgatcttggcgataacgccgccgttccggttaagctggtgcatatcaataaatgtccggtgctggcccaggcgaatacgctacgcccggaagatgccgaccgactgggaattaatcgtcagcattgcctcgataacctgaaaattctgcgtgaaaatccgcaagtgcgcgaaaaagtggtggcgatattcgcggaagccgaaccgtttacgcctagtgataacgtggatgcacagctttataacggctttttcagtgacgcagatcgtgcagcaatgaaaattgtgctggaaaccgagccgcgtaatttaccggcactggatatcacttttgttgataaacggattgaaaagctgttgttcaattatcgggcacgcaacttcccggggacgctggattatgccgagcagcaacgctggctggagcaccgtcgccaggtcttcacgccagagtttttgcagggttatgctgatgaattgcagatgctggtacaacaatatgccgatgacaaagagaaagtggcgctgttaaaagcactttggcagtacgcggaagagattgtctaatttgaagcctccgccgctggtacggcggaggacaatgttgagtcaggctttttgaacggtgatgctccacgctgcatcgccaatctgctgataatcggtgatggcatgtccttcttctgccgcccactgtgggattgcttcagttgcctgggtgcaatcaaactcaatcactaactcatcgccgctgaccatttctgccagagctgcttttgcttctatgagtggaaacggacagacctgcgtcaccacatccagctttttaatcaccatctttacaccttacttaatttgccgcagcagttgccagtcgcgccttacgctgcggtcgaacatacacaagccaggacgcagtccagactccgagaatcataaatacaaggccaatccagccctgccaggtcatcattgcagtcataaccagtccattaccgatagagcaaccacctgcaatactggcaccgaagcccatcagtacaccacctaacccgctacgtaatgttgtttgtgcatcagctgcgcgaacgcggaactcacggctcgctttggctgcaataaaactccccacgaagatccctaacaccaggaaaacgccccagttaatgtatttcatgtcacccgcgaccagaaattgcagaatattggccgttggggaagtgattcctaacccaaacatgcgtccggttgcttcactcaggggccaggctaaaagcgcaatcaaaccgatgagtacagctgtgacaaagggatgccagcgtttttcaaacagaatatgagcgatcccggttcggcgcggcggtaaggtcgcgactttgagttttggcttcttcaactctttcatcaccacccagagcgttatcaccagcaaaacggcaaccaacggccacacagacaaattaaaagtctcagcaatagagttatgttcagtactgtagtgctgcaaggtttgatttaaaccactggcatgtggagaacgcatcaccgcactcatcaccatataagtgaaaagcgcgatccaactgccgatcaatccctcacccgcgcgataccaggtcccggtggcacatccacccgccagaacaattcccagcccgaagatatacccacctataacagtaccaagccacgggaacgccccggcttcgtaagtcagtaggcccgcctgaattaacgcaaaaacccccacgctttgtacgctaattgcaatcagcaaggcgtaaaacatgcgattatttttcacgatatacatatcgcgaaaaccacctgtcaggcaaaaacgcccacgctgcatgacaaatcccagcagagcaccacaaattagcccgcttaatatcatactaaacataaattaattaaccagatgaatgttaatgaggaaattattcatgactggtggaatgcagaccaataaccaaattctctaaattagaacaaatggttattaatgaggagttcgatacaaaagaataaaaaaaccggagccaaatgttcattcgactccggtttattattagaaaagatgattatgctacgtcttcgtactgcggaaccggattacggaagctcttggtgacgcaagccaggtaaatcagaccgatagcagcccagatcagacccagaaccatactgctttcttccaggttaacccacagcgcaccaacggtcagcgcaccacacatcggcaggaacagatactggaagtgatctttcagcgtcttgttacgcttctcacggatccagaactggctgatgacgctcaggttaacgaaagtgaacgccaccagcgcaccaaagttaatcagcgccgttgccattaccaggtcgaagttgattgccagcagggcaatcgcgccaaccaggatgatgttcatcgccggagtacgccatttcgggtgtacataaccgaagaagcttttcgggaatacgccgtcacgacccattacgtacatcagacgcgctacgcctgcatgcgccgccataccggacgccagtacggtaatggtggagaagatcagcgcgccaacctggaacgctttacccgcaacgtacagcatgatttcaggctgactcgcatccggatctttaaagcgagagatatccgggaagtacagctgcaggaagtaagttgcaaagatgaagatcatgccgccgatcagcgcggtcaggaaaatcgcacgcgggatcacgcgctctgcatctttggtttcttcgctcaggttgctgatgccgtcaaagccggtaaaggagaagcacaggattgtcgccccggtaatcatcgggataacatgcgcatcgccagaccagaatggacgagtgctcgccagcgtaccagcgccttcaccttcaaatacgccataaacaaccatgcccagaatcaccgcgatcagcactacctgcaacacgacgattacagtgttgaagttcgctacggatttcagactacgcaggttaaaggcggtcataaaggccaccagcgccaccacaaacatccagcttgggatggaaggcaccagagcttcaaaatagattttcgccagtagaatgttgatcatcggcgcgaacagatagtcgagcagagaagaccaacccaccataaagccgacagtcgggctaatggatttctgggcgtaagtgtatgcagagccagcagaaggatagcggcgaaccagcttcccgtagctcagagccgtaaacaggatcgcaatcaatgcgaacgcataggctgtcggcacatgaccatccgtgaggccactaacgataccaaaagtatcaaacagcgtcatcggctgcatataggcaagacccatcattacaaccggaactaacgtaagcgttttacgcaattccacgcgagaggtgtttggagtaacgttatggctcatggtcattctcctttacggtgataaccgtcgcgtaagcaaaaaattgccccatttttttggattcctcagcgacaacaactgtcgatttttagtaaatatctatccggtacgaagcccggcctcttggtatgaatgattggtttgaagcaaaaaataaccgacgctgatgaaacgtcggtttttagtcattttttgacagcggcgcattgtgcctaaatgggggggaaatgacaagagaatgagaggcttgtcagaataatttttctttaaatggcactttttccgtcatcagattttgcataaacaccggcgatcgcactatttgctaaaatttcatcccgccaccagccactggcaagtcctgcggtctgttcgttccagccaatccagacgggttcaaagagagtttgggcgaccactttcttctcgattaacgcgccactatcgagaaaacgttgcgccagataacggggtaaatagccgcagccgaggccgctaatttgcagctccagtttggttttaaaatcgaaaacggtaatggcttcttgttcgtcgagaagttgacttgccgtagaagcgcctgcctgcgcagtatcccccaccacaatcgcccgatatcgcttaataatacgacgatttaacggctcttcttccagggctaacggatgatgaggcgcgaccgcaaagacttgttccagatcgcccaaccgactaaaaccaaactcactggaagatggtggctcatgcatcgcgccaacaataatatccgctcgcccctgagtcagggcatcccaactaccaccgagtacgccattgataaacttcaggcgcgtcacgctatgatgttgataaaaagcttcaatgagtggcgcaagcagagaaaaaggaaacgtgtcgtccacgccaatcaccagctcgttttcccagccttcatgcagtttgatcgcctgcttttccagttcccgcacggtatgcagaacttcccgccctttctctaataacatttttccggtgcgggtgaatttagcgcggtgtccgctacgatcaagcaattgaatattaaggtcgctttccagcttgtgaacggtgtaactcagagcggacggcgtcttgtagagtttggcgctcgccgccgcaaaactgccttctttttctaaggcatcgaggatcatcaacacatccagcagtggtttcatacacgcccccttgcagtgcatgcggcgtcctgctggcgtgatcgtttactccagcggcattaccagcggatcgggatactggtattcaaatcccagttcattacaaatccgactgccatcaataatcttacctttgccgctgtccagactatttctgaactgcggaggttccagccccagtaaacgggccatctgcggatagaaaacattacgcgcagggtgagctggcgcacatatattatagatgtgtccgcctttaggtgcctgtaacaacagagtgatagcgccaataacatcttctaaatggactaaattaacaccatgttcaccatcaggcgcggtttttccggcaaagaagcgtccgggatgacgtcccggtccgaccaggcccgcaagacgcagaatatcgacgctagtaccgggtaaattgtgcagccagtcttcgagttcttctaatactcgtccactgttggttactggattacgcggggtggtttctttcaccgtgccttgcgcgtcgccatagacagatgtactgctggtaaaaataatgcggggaatacgatgggccagcgcgctatccactaactcttgtaccgcttgtaaatagaactcatcgccggggccgctacgacgtgccggaagcgtaatgaccagcgcatcggcatccatcagggcatccagatcgtcagaatcgcaaactagctcaggctccatgcgaagcagatagctatcaatgccactcattcgggccgcttcgacaccatcttgtgtggttttactcccggtgacttgccagcctcgcgcactaagactcatcgccagcggcatgcctaaccaccctaacccgacaattgcgacctttttcatccgttatctcctgatacaccttagatctataaggctacgctagcgtatcaaaactgacaattcattctatgaatgaatctgttcaataatgataacgacatgctgcaatgagcagactatcgtcggtaaccgcgtataccagacggtgctcctctgtaatgcgtcgggaccagaaaccactcaaattatgtttcaggggttctggcttccccttaccttcaaatggcgttctgcgggtatctttgataagttcattgatctttttaacaattcgcttatctgtttcctgccagtacagataatcgtcccaactttcctcagaccagattagtttcactcaatgatgtccttttccgttcctttgccacttttcaggctatcgatactgtccatcaatctccgggcgttagcgggggagcgcagtagataagccgtctcttccaggctgttgtattcttcgagactcatcagaacacaagcctctccattctgacgagtaataaggatcggggcatgatcttcaacggctttcatcattgttgcgctcaaattctgacgcgcttcgctgtagctaattgtacgcatgtcaatctcctcttttgtacagttcattgtacaatgatgagcgttaattaactatttattaattagtttgtagatcaaggtattgtcagtgagacgaaaatccaggcttcgctatttttggtgccatcagctaagaggacagtcctcttagccccctcctttccccgctcattcattaaacaaatccattgccataaaatatataaaaaagcccttgctttctaacgtgaaagtggtttaggttaaaagacatcagttgaataaacattcacagagacttttatgacacgcgttcaatttaaacaccaccatcatcaccatcatcctgactaatctttcaggcgatgtgtgctggaagacattcagatcttccagtggtgcatgaacgcatgagaaagcccccggaagatcaccttccgggggcttttttattgcgcggttgataacggttcagacaggtttaaagaggaataacaaaatgacagacaacactcgtttacgcatagctatgcagaaatccggccgtttaagtgatgacagtcgcgaattgctggcgcgctgtggcattaaaattaatcttcacacccagcgcctgatcgcgatggcagaaaacatgccgattgatattctgcgcgtgcgtgacgacgacattcccggtctggtaatggatggcgtggtagaccttgggattatcggcgaaaacgtgctggaagaagagctgcttaaccgccgcgcccagggtgaagatccacgctactttaccctgcgtcgtctggatttcggcggctgtcgtcttagcctggcaacgccggttgatgaagcctgggacggtccgctctccttaaacggtaaacgtatcgccacctcttatcctcacctgctcaagcgttatctcgaccagaaaggcatctcttttaaatcctgcttactgaacggttctgttgaagtcgccccgcgtgccggactggcggatgcgatttgcgatctggtttccaccggtgccacgctggaagctaacggcctgcgcgaagtcgaagttatctatcgcagcaaagcctgcctgattcaacgcgatggcgaaatggaagaatccaaacagcaactgatcgacaaactgctgacccgtattcagggtgtgatccaggcgcgcgaaagtaaatacatcatgatgcacgcaccgaccgaacgtctggatgaagtcatcgccctgctgccaggtgccgaacgcccaactattctgccgctggcgggtgaccaacagcgcgtagcgatgcacatggtcagcagcgaaaccctgttctgggaaaccatggaaaaactgaaagcgctgggtgccagtagtattctggtcctgccgattgagaagatgatggagtgatcgccatgagctttaacacaatcattgactggaatagctgtactgcggagcaacaacgccagctgttaatgcgcccggcgatttccgcctctgaaagcattacccgcactgttaacgatattctcgataacgtgaaagcacgcggcgatgaggccctgcgggaatacagcgcgaagtttgataaaaccacggttaccgcgctgaaggtgtctgcagaggagatcgccgccgccagcgaacgcctgagcgacgagctaaaacaggcgatggcggtggcagtaaagaatattgaaaccttccacactgcgcaaaaactgccgccggtagatgtagaaacgcagccaggcgtgcgttgccagcaggtcacgcgtccggtagctagtgttgggttgtatattcctggcggctccgccccgctcttcagtacggtattaatgctggcgactccggcgagtattgcgggctgtaaaaaagtggtgctgtgcagtccgccgccgattgccgatgagatcctttatgcggcgcagctgtgcggtgtgcaggacgtgtttaacgtcggcggcgcacaggccattgccgcactggcgtttggtacggaatctgtgccaaaagtggacaaaatcttcgggccgggtaacgcctttgtcaccgaagcgaaacgtcaggtgagccagcgtctggacggtgcggcgatcgatatgcccgcaggcccgagcgaagtgctggtgattgctgacagcggcgctacgccggatttcgtggcttctgatttgctctctcaggctgaacacggcccggacagtcaggtgattttactgacgcccgctgctgatatggcgcgtcgcgttgccgaggccgtcgaacgccaactggcagaactgccgcgtgccgaaaccgcccgccaggcactgaacgccagccgcctgatcgtgactaaagatttagcgcagtgcgtggagatctccaaccagtacggcccggagcacctgatcattcagacccgcaacgcccgtgaactggtcgatagcatcaccagcgccggtagcgtatttcttggtgactggagtccggaaagcgcaggtgattacgcctccggcaccaaccacgttctaccgacttacggttacaccgccacctgttccagcctcgggctggcagatttccagaagcgcatgaccgtacaggaactgagcaaagaggggttctccgcgctggctagtaccatagaaacactggccgccgccgagcgcctgaccgcccacaaaaatgccgttactttgcgtgttaacgcccttaaggagcaagcatgagcaccgtgactattaccgatttagcgcgtgaaaacgtccgcaacctgacgccgtatcagagcgcgcgtcgtctgggcggtaacggcgatgtctggctgaacgccaacgaataccccactgccgtggagtttcagcttactcagcaaacgctcaaccgctacccggaatgccagccgaaagcggtgattgaaaattacgcgcaatatgcaggcgtaaaaccggagcaggtgctggtcagccgtggcgcggacgaaggtattgaactgctgattcgcgctttttgcgaaccgggtaaagacgccatcctctactgcccgccaacgtacggcatgtacagcgtcagcgccgaaacgattggcgtcgagtgccgcacagtgccgacgctggacaactggcaactggacttacagggcatttccgacaagctggacggcgtaaaagtggtttatgtttgcagccccaataacccgaccgggcaactgatcaatccgcaggattttcgcaccctgctggagttaacccgcggtaaggcgattgtggttgccgatgaagcctatatcgagttttgcccgcaggcaagcctggctggctggctggcggaatatccgcacctggctattttacgcacactgagcaaagcttttgctctggcggggcttcgttgcggatttacgctggcaaacgaagaagtcatcaacctgctgatgaaagtgatcgccccctacccgctcagcacgccggttgccgacattgcggcccaggcgttaagcccatagggaatcgtcgccatgcgcgaacgggtagcgtaaattattgcagaacgcgaatacctgattgccgcactgaaagagatcccctgcgtagagcaggttttcgactctgaaaccaactacattctggcgcgctttaaagcctccagtgcggtgtttaaatctttgtgggatcagggcattatcttacgtgatcagaataaacaaccctctttaagcggctgcctgcgaattaccgtcggaacccgtgaagaaagccagcgcgtcattgacgccttacgtgcggagcaagtttgatgagtcagaagtatctttttatcgatcgcgatggaaccctgattagcgaaccgccgagtgattttcaggtggaccgttttgataaactcgcctttgaaccgggcgtgatcccggaactgctgaagctgcaaaaagcgggctacaagctggtgatgatcactaatcaggatggtcttggaacacaaagtttcccacaggcggatttcgatggcccgcacaacctgatgatgcagatcttcaccagccaaggcgtacagtttgatgaagtgctgatttgtccgcacctgcccgccgatgagtgcgactgccgtaagccgaaagtaaaactggtggaacgttatctggctgagcaagcgatggatcgcgctaacagttatgtgattggcgatcgcgcgaccgacattcaactggcggaaaacatgggcattactggtttacgctacgaccgcgaaaccctgaactggccaatgattggcgagcaactcaccagacgtgaccgttacgctcacgtagtgcgtaataccaaagagacgcagattgacgttcaggtgtggctggatcgtgaaggtggcagcaagattaacaccggcgttggcttctttgatcatatgctggatcagatcgctacccacggcggtttccgcatggaaatcaacgtcaaaggcgacctctatatcgacgatcaccacaccgtcgaagataccggcctggcgctgggcgaagcgctaaaaatcgccctcggagacaaacgcggtatttgccgctttggttttgtgctaccgatggacgaatgccttgcccgctgcgcgctggatatctctggtcgcccgcacctggaatataaagccgagtttacctaccagcgcgtgggcgatctcagcaccgaaatgatcgagcacttcttccgtagcctcagttacaccatgggcgtgacgctacacctgaaaaccaaaggtaaaaacgatcatcaccgtgtagagagtctgttcaaagcctttggtcgcaccctgcgccaggccatccgcgtggaaggcgataccctgcccagcagcaaaggagtgctgtaatgaacgtggtgatccttgataccggctgcgccaacctgaacagcgtgaagtctgccattgcgcgtcacggttatgaacccaaagtcagccgtgacccggacgtcgtgttgctggccgataaactgtttttacccggcgttggcactgcgcaagcggcgatggatcaggtacgtgagcgcgagctgtttgatctcatcaaagcctgtacccaaccggtgctgggcatctgcttagggatgcaactgctggggcggcgcagcgaagagagcaacggcgtcgacttgctgggcatcatcgacgaagacgtgccgaaaatgaccgactttggtctgccactgccacatatgggctggaaccgcgtttacccgcaggcaggcaaccgcctgtttcaggggattgaagacggcgcgtacttttactttgttcacagctacgcaatgccggtcaatccgtggaccatcgcccagtgtaattacggcgaaccgttcaccgcggcggtacaaaaagataacttctacggcgtgcagttccacccggagcgttctggtgccgctggtgctaagttgctgaaaaacttcctggagatgtgatgattattccggcattagatttaatcgacggcactgtggtgcgtctccatcagggcgattacggcaaacagcgcgattacggtaacgacccgctgccgcgattgcaggattacgccgcgcagggtgccgaagtgctgcacctggtggatctgaccggggcaaaagatccggctaaacgtcaaatcccgctgattaaaaccctggtcgcgggcgttaacgttccggtgcaggttggcggcggcgtgcgtagcgaagaagatgtggcggcgttactggaagcgggcgttgcgcgcgtagtggtcggctccaccgcggtgaaaagtcaagatatggtgaaaggctggtttgaacgcttcggtgccgatgccttagtgctggcgctggatgtccgtattgacgagcaaggcaacaagcaggtggcagtcagcggctggcaagagaacagcggcgttagtctggaacaactggtggaaacctatctgcccgtcggcctgaaacatgtgctgtgtaccgatatcagccgcgacggcacgctggcaggctctaacgtctctttatatgaagaagtgtgcgccagatatccgcaggtggcatttcagtcctccggcggtattggcgacattgatgatgtggcggccctgcgtggcactggtgtgcgcggcgtaatagttggtcgggcattactggaaggtaaattcaccgtgaaggaggccatcgcatgctggcaaaacgcataatcccatgtctcgacgttcgtgatggtcaggtggtgaaaggcgtacagtttcgcaaccatgaaatcattggcgatatcgtgccgctggcaaaacgctacgctgaagaaggcgctgacgaactggtgttctacgacatcaccgcttccagcgatggccgtgtggtagataaaagctgggtatctcgcgtggcggaagtgatcgacattccgttttgtgtggcgggtgggattaagtctctggaagatgccgcgaaaattctttcctttggcgcggataaaatttccatcaactctcctgcgctggcagacccaacattaattactcgcctggccgatcgctttggcgtgcagtgtattgtggtcggtattgatacctggtacgacgccgaaaccggtaaatatcatgtgaatcaatataccggcgatgaaagccgcacccgcgtcactcaatgggaaacgctcgactgggtacaggaagtgcaaaaacgcggtgccggagaaatcgtcctcaatatgatgaatcaggacggcgtgcgtaacggttacgacctcgaacaactgaaaaaagtgcgtgaagtttgccacgtcccgctgattgcctccggtggcgcgggcaccatggaacacttcctcgaagccttccgcgatgccgacgttgacggcgcgctggcagcttccgtattccacaaacaaataatcaatattggtgaattaaaagcgtacctggcaacacagggcgtggagatcaggatatgttaacagaacaacaacgtcgcgaactggactgggaaaaaaccgacggacttatgccggtgattgtgcaacacgcggtatccggcgaagtgctaatgctgggctatatgaacccggaagccttagacaaaaccctcgaaagcggcaaagtcaccttcttcagccgcactaaacagcgactgtggaccaaaggcgaaacgagcggcaatttcctcaacgtagtgagtattgccccggactgcgacaacgacacgttactggtgctggcgaatcccatcggcccgacctgccacaaaggcaccagcagttgcttcggcgacaccgctcaccagtggctgttcctgtatcaactggaacaactgctcgccgagcgcaaatctgccgatccggaaacctcctacaccgccaaactgtatgccagcggcaccaaacgcattgcgcagaaagtgggtgaagaaggcgtggaaaccgcgctggcagcaacggtacatgaccgctttgagctgaccaacgaggcgtctgatttgatgtatcacctgctggtgttgttgcaggatcaggggctggatttaacgacggtaattgagaacctgcgtaaacggcatcagtgagttgcggggtaagcggatgcgatattgttgccgcatccggcaaaaaaacgggcaaggtgtcaccaccctgccctttttctttaaaaccgaaaagattacttcgcgttgtaattgcgtagagcattacgccccagcacaatccccgcgccaaccatgccacccagcagcaccgccagaatcaaggtaattgcctttttcgggctatcacgacgaataggtaacatcggtttcatcacataacggtaagcatgaatatcaagatcatcaacttttaagctttcgatatccagcaggttttgacgagtctgatagtagtttgggctgaacaccaacggacgggtcgcctcatgcttaatcatgctctccagcgcttcgctccccaaaaggaacaacgtatcttgtgtgatatcttcgccagtctgttgaatctgcggttttgtcacctgcgcctgattcgcatactgcaacgcttcctgaatctgacggatacgcagatctttctgctcctgcgcgactacttcctgcgttcttaaagagtcctgcaagtttttccgtcccagagcaatgttgtctttgagatccttttctagctcttgattcactttatcgtcaacttgctgaatgtattgggccaacttcatttgtgcgccctctgcagtttgcccaacataagaaacagtcaatggtaattgctggttcttaacagaaggttcgatggtaagtttttctcgttcttcctgattatccagcgtttctgctaatgcagagaaggcagaactgaagcgaccaattaacgtctcctgcaaatcgcttactttcggtgcagcctgaccatagataacattcatggcattgttatagccagcaatttgccccacgtcgggctgagtgataattgctgtactcgtccatttctccttcgctactgccaaatatccaatagccagggcaatagccacaatgacggaaatgatgattgtcatcttgccacgccacaactgcactagtaaatcaatcaaatcaatctgttccgggtcatggttttgcccagaaacattattattttctactctcatcattaccctaactgacggaaatttccaagtccgcatagtttagcgataatcctcgtgaatgctataggataagtgataaaaataatgaattgttgtgtaagtaacaaaagacaatcagggcgtaaatagccctgataacaagatgttagtcgctgccaaagagatcgcgggtgtataccttatctgccacatccttaagctcttctgccattcggttagagataatgacgtcggcttgttgtttgaaggtggcgagatcacgttccaggcgagagttgaagaaactgtcttctttcatcactggctcgtagatgatcacttcaacacctttcgccttgatacgtttcataatcccctgaatagaagacgcacggaagttatcactaccgctcttcataatcagacgataaatacccaccacttgcggcttgcgactcaaaatggcatcggcaataaaatctttacgcgtgcggttagcatcgacaattgcgctgatcaggttattcggcacagactggtagttcgccagtaactgcttggtatctttcggcagacaataaccaccataaccaaagctcggattgttgtaatggttgccaatacgtgggtcgagacaaacgccttcgattatttgacgggaattcagacctaaactttctgcatagctatccagttcgttaaagtacgccacgcgcatcgccaggtaggtgtttgcaaaaagtttaatcgcttctgcttcagtggagtcggtaaacagcatcgggatattttgcttaatcgcgccttcctgtaacagagcagcgaaacgttctgcgcgttcactacgctcaccgatgacaatacgactaggatggagattatcgtaaagggctttaccctcacggagaaattccggggagaatataatattttcagtgcgatatttcttatgcatcgctgcggtaaaaccaacgggaaccgtacttttgatgaccataaccgcataaggatttatctcaactacgtctttaattacactttctacactggatgtattgaaataattagttttaggatcatagtcggttggagtggcgatgatgacataatcagcatcccggtaggcttcatttttatctaatgtggcattaaagtgtattttatcactttgcaaaaactgctgaatttccttatcaacaataggagatatccgatcattcagcatagcaacgcgactcggtaaaatatctaatgccacaacctcatgattttgtgcgattagaagcccgttactcaagcctacatagccagtaccggaaatggtgattttcatttcatgctctcagaattaacttaactgtgaatcatgatgtttttagcatcctgataagagctaaaagttttaacgctacgttgttcgatggtcaacgcaacgaaaaacaattcagattttctttataagaatagctgatatttattaagttaatattaagcagtgaaatttagtctataagatatttggcaaaaaaaagcccggtgcaatatacgccgggcctcaattttattgttggttaaatcagattaatccagccattcggtatggaacacaccttctttatcaatacgcttataagtatgcgcaccaaaatagtcacgctgtgcctggatcaggttcgcaggcagaacagcagcacggtagctgtcgtaataggcaaccgctgcggagaaggtcggaaccggaataccgttctgtactgcataagcaacgacatcacgcagcgcctgctggtagtcatcggcaatttgcttgaagtacggagccagcaacaggttagcgatctgtggattttcggcataagcatcggtgattttctgcaggaactgcgcacggatgatgcagccagcacggaaaatcttcgcgatttcgccgtagttcagatcccagttgtactcttcagacgcagcacgcagctgagagaagccctgggcgtaagaaacgattttgcccagatacagcgcacgacgaactttttcgatgaactcagccttgtcgcctgctggctgtgcttgcggaccagagagaactttagatgcggcaacacgctgatctttcagagaagagatataacgtgcaaacacagactcggtaatcaggctcagcggttcgccgagatccagcgcgctctggctggtccatttaccggtacctttgttagccgcttcatccaggatcacatcaaccaggtagttaccgtcttcatcttttttggtgaagatatctttggtgatgtcgatcaggtaactgctcagttcaccgttattccactcggtaaaggtctgcgccagttcttcgttggtgaggttcaggccacctttaagcagagaataggcttcagcaatcagctgcatatcgccgtattcaataccgttgtgaaccatcttcacatagtgacctgcgccatcggcaccaatataggtaacgcatggttcaccgtcttcagctacggcggcgattttggtcaggatcggtgctaccaattcataggcttctttctggccaccaggcataatagaaggacctttcagcgccccctcttcaccgccagaaacaccggtaccgatgaagttaaagccctctgcactaagctcacgattacgacgaatagtgtcctggaagaaggtgttaccaccatcaatgatgatgtctcctttatcgagatatggtttgagggaatcaatagcagcatccgtgcctgcacctgctttcaccattaacaggatgcgacgaggcgtttccagagattcgacaaactctttcaccgtatagtaaggaaccagtttcttgcctggattttcggcaatcacttcttccgtcttctcacgggaacggttgaaaatagagacggtataaccacggctttcgatgttgagcgcaaggttgcgtcccatcactgccataccgactacgccgatctgttgcttggacattacatactcctgtcaggtgtgatcaccgcgctgaatgctcgcggcctggaatgttcgcaaataagtatacaaagtacttattaaagtataaatagcttatccatgcttatatgcttacggctttatatgtctccacatgcgatatttcttaaataatgttttattattaccacttttaattcagggataatgtgaggttattaccctcaaataatatgagataaatagtgctgcaacattgcatttttgccccgatttatccatgatcgaattgtgacatttgtcatacaacgaataggttttgtacttactatggaatggattgccgatccgtctatctgggccgggttaatcacgctgattgtgatcgaactggtcctcggcattgataacctggtctttattgccatcctcgccgaaaaactaccgccgaagcagcgtgaccgcgcacgggttaccgggctgctgctggcaatgttaatgcgcctgttactgctggcgagtatctcctggctggtcaccctgactcaaccgctgttcagcttccgcagctttacctttagcgcccgcgacttaatcatgctgtttggtggtttcttcctgttgttcaaagccacgatggagctgaacgaacggctggaagggaaagacagcaataatcccacacaacgcaaaggtgcgaagttctggggcgtggtgacgcaaattgtggtactggacgccattttcagtctcgacagtgtgattaccgccgtcgggatggtcgaccatttactggtcatgatggccgccgtggttatcgctatcagcctgatgttgatggccagcaagccgttaacgcaatttgttaacagtcacccgacgatcgttattctctgcttaagcttcctgttgatgattggctttagcctggtggcagaaggtttcggcttcgtcattccgaaaggctacctgtacgctgccattggtttcagcgtgatgatcgaggcgctcaatcagttggctatctttaaccggcgacgttttctttccgctaaccagacgctgcgccagcggactaccgaagcggtaatgcgcctgcttagcgggcaaaaagaagatgcggaactggacgccgaaaccgcgtccatgctggtggatcatggtaaccagcagatctttaatccgcaggaacggcggatgattgagcgggtacttaatcttaaccagcgtaccgtcagcagcattatgacgagccgccacgatattgagcatatcgatctcaacgcgccggaagaagaaatccgccagttgctggagcgaaatcagcatacgcggctggtggttaccgacggtgatgacgcagaagatttgctcggtgttgttcacgttatcgacctgctacaacagtctctgcgcggcgaaccgctcaacctgcgggtgttgattcgccagccgctggtgttcccggaaaccttgccgttgttacctgccctggagcagttccgtaatgcccgcacgcactttgcttttgtggtggatgagtttggcagcgtggaagggattgtgacattaagtgacgtcactgaaaccattgccggtaacttaccgaacgaagtggaagagatcgacgcccgccatgatattcagaagaatgcggacggttcctggacggcgaatggtcatatgccgctggaggatctggtgcaatatgtgccgctgccgctggatgaaaaacgtgaatatcacaccattgccgggctgttgatggagtatttgcagcgtattccaaaacctggcgaagaagttcaggtgggggattatttgcttaaaacgttgcaggtagaaagccatcgcgtgcagaaggtgcagattataccgctgcgtaaggatggcgagatggagtacgaggtgtgatggtatcggtcattttacccaatagccgaaaggaataagatgagggaaccgcgccatcggcgatttaccgccgggagcccgggttgccagggtggtggagattgagccaccctggcacgttcaccggcttgagcgttccatagtagcgaggaacatcaagtgaacggaacagccttcgatcttacatattcagaatataatgatgccgccacgaacgcctgatgcgacgctttacgcgtcttatcaggcctacaggactggtcacctggtaacttacatcttctccagcaacttcttcacatctttgccattacgggaatctttattccgctcggcccagtcattcaggcgacgtttcgcttcgtcctgtagatgtttgcgcagtaactgatccacttgcaggctgtaattgagttgctgccagttgccataaacccgcagcggtactggcgtttctttcaggaaatcaatcagtttgctttccccgttccagccacccacgacccgaatatcaaactgggtgtcgcaggtttgatctgccagattcaacatgccttcccctgtcagcgccagcacagggctttgaccttgcatgtcgtttaacgtcacgacgccatccttcaacgtcaaatcggtggtaaagcggtcaagccgcgtcacgttatcaaagttttcagcggccttcacatcaccgccattacgctctaccgcttgctgaatcatctgctggaagttcatcccttccatgcgcgtgtcggtcatttcgacatgtgcctgtccttgccagttgtggcggaatgcgtcggcatctatgtcagcaccggagaaatcaccagccagactcatttttccggtcaagctaatcggatagttaaacgccttcagaatggtaccaatctcaacgttttccagccgtggctggaagtttatccgcggatttatacttgtcgcgtccagcgtgcccggcagactaacctgtccaccgttaagtttgccctgcagttgagtaatttccagcaaaccgctcttgttggtcatttgcgtggcaacatctgtaaaattcattccgcgccagcgcacgttactggcctgcaacaaaatatcagccgtaaagccttgcagtccctgataggccggttcatcaatacggctagaaatgaccgggcgcggcaacgtactttggctctgcccctgctgcgcggcaccgttttcaccattcgcggtttcattaagcgggatgaggttgtcaagattcagttgcgggaattgcagcctcagctgccattccggtttctctgtcagcgtaacctgtgcttgcccgcttagcgtactatcattggcggtcaaactaatttggttaaaactaaggcgtttatgactctcctgccactgggcctggaaactcccctgcccctgaataccttgttttggtaaatcggcaccctgcaactgccagttaatttgttcaatagccgccgttaaatcatgcggataatcagaagcatctaccgtaccgttaagggatatcgtgagatcgcgctgatcgcgattaacccgcccggagaactcaaaactaccacgatgttggggatcttgttccatttgcaggcgaatattgcggattgtcacctgctcgtcatcttcatgctggaacaccagcacgctgtccgccaccttaagactggatatatcaaagctccatccgcgatcgtcactcagatccggcaaggtattgtcgcgcggtgcaaccggagcgtcttcactgcgcaccgcttccgtctgcggcgtcagttggatcactgccccttttagcatcacctgcttaacgctcagttgatgactcagtagtggtaaaagcgccacgtccagacgcatgttgtcggcgcgaaccagtggctggcttgcgccctgggcggtgagagacattcgcccggagaggatactaagctgcggccagacgtgccaacgcagtggcccgtcgagctgcaattgataaccgctacgtgcagcaacttgcttgaccatatagtcgcggaaatcattcggattcaccagcaacactaacgcagataacccggccaccagcacgaccaggagtatcatcagcgtcgtcagaaatcgtctcatggtatcctcaatgggcctgaattagtctttatcgattcggctggctaccgcgccctgctggttgcgatatttcgcatcttcacggcggttgtaaggtcgcaccgccgggccggaaagcggctcaaagctcagcgcaccaattaacatgcccggacgcagcgccagcggcagcttaccggagttgtagaactccagcacaatgcaaccagaccagcccggatcgatgcggtgcgcggtgacgtgcaccatcagccccagacgcgccagactggaacgcccgtccagccagcccaccagatcggctggcagcgtcacgctctccagcgtcaccgccagcgccagctctcctgggtgaagatagaacgcctcgccctcgtcgagaacgatctcatcgctcatcacgcggtcaagcgcggcgctcacttcatctttgggaccgctcagatcgataaacgctgccgtgtgaccacggaaggtacgaaatttattgcccaggcgtacatccaccgtcgcgccgttaatacgctccactggcggacgtgggttgatgctcaaacggccttcatcaagccaggcttcaatatctcggtcacacagacgcatggcattttctcctttcgcgcatcactcccttaacgccaattacgtcaagggcatactaggttatcactgaacggtacacaatttatcaagcttattcaaagaactgacttattttcgctttcaatatatcgatcgcgatgcggtttttcccgccgcgcggcacgataatgtccgcatattgtttagaaggctcaatgaattgcaggaacatcgggcgcacggttttttgatattgcgccatcacactatccatactacgcccacgctcgttaacgtcacgcttgatgcggcgcatcaggcagatatccagcggggtatcaacgaaaatggagaagttaagttcgtcacgcaaacgcgcatccgtcagcaacaaaatgccttcgagaatgatgaccttcttcggctcaaccgtcaccgtttctttcatacgcgtatgttcaacatagctgtaaaccggcaggtcaattgcgctgccgcgtttcaacgcttgtaaatgctcaagcagcagactgtgatccatcgcgctgggatggtcgtagttggtcttaacgcgttcttccatgctcagatggctttgatctttgtaatagcagtcttcgggaattacgccgatgtgttcatcaccgacttgctcacgcaattcacgataaagggtactggcaataagactcttgccggaagcgcttgcgccagcgataccgataatgacgcactgatgagactgatcagtcatatatttagcgacctgattaacctggatgttaggaagggggcgacgaagcgccaaacgcggcaattatagggatttcatccgtctgataccagtcgaatagcgttgccgcgcgctcagagttaattgttgacaaagaattcccgggggcaaattacgttgatcagttttatgtaaggtaaaaaatgttaaacgcagttgcgcaaattatccgcctttacgtcactttatgagcaattcgcatataaaatgtaaaacttttgtactagcataaacacagaaacgaatactggcgaccaggtcttgcggataaagcggtaatgagcaaacaaagtcagcatgtattaattgccctgccccacccgctgcttcacctggtcagtttaggtttagtcagctttatctttacccttttcagccttgagcttagccagtttggcacccaactcgccccactgtggttcccgacgtccatcatgatggtggcgttttatcgccatgccgggcgcatgtggccgggaattgcgctgagctgtagcctgggaaatatcgccgcatccatcctgcttttttccaccagcagcctgaacatgacctggacgaccatcaatattgttgaagccgtggtcggggcagtgctgctacgtaaattgctgccgtggtataaccccttgcaaaatctggctgactggctgcgtctggcactcggcagcgccattgttccgcctctgttggggggtgttctggttgtcctgctgacgcccggagacgatcctctcagggcatttttgatatgggtactgagtgaatccatcggcgctctggcactggtgccgctgggattgttatttaaaccacactatctgctgcgccatcgcaacccacggttgctttttgagagcctgctcacgttagccatcacactgacgttaagctggcttagcatgctgtatctgccgtggccttttactttcattattgtgctgttgatgtggagcgccgtgcgtctgccacgaatggaagcctttttgatcttccttaccacggtgatgatggtgagcctgatgatggccgcggatccccccctgcttgctacgccgcgtacgtacctgatgagccatatgccgtggctaccgtttttgctgatcctgctgcccgccaacatcatgaccatggtgatgtatgcctttcgtgcggaacgcaaacacatttccgaaagcgaaacccactttcggaacgcgatggaatattccgctatcggtatggcgttagtgggcaccgagggacaatggctgcaaaccaacaaagcgctctgccagtttctcgggtacagtcaggaagagctgcgcggactcacctttcagcaactgacctggccggaggatctcaataaagatctccaacaggttgaaaagctgataagcggtgaaataaacacctatagtatggaaaaacgctactacaaccgcaatggcgatgttgtctgggcgttgcttgccgtcagtctggtgcgccacacggatggcacgccgctctattttatcgctcagattgaagacattaacgagctaaaacgcaccgaacaggtcaatcagcaactgatggagcgcatcactctggctaacgaagcgggcgggattggcatctgggagtgggagttgaagccgaatatttttagctgggataagcggatgttcgagctgtatgaaattcctccacatatcaaaccgaactggcaggtgtggtacgagtgcgtgctgccggaagatcgccagcatgccgaaaaagtgattcgtgatagcttgcaaagtcgcagcccctttaaactggaatttcgcattaccgtaaaagacggtattcgccatatccgcgccctcgccaaccgggtactgaataaagaaggcgaagtcgaacgtctcctcggcatcaatatggatatgaccgaagtgaaacagcttaacgaggcattgtttcaggaaaaagagcgcctgcacattacgcttgattccatcggtgaagccgtggtctgtattgatatggcgatgaaaattacctttatgaatccagtggcggagaagatgagcggctggacgcaggaagaagcgttaggtgttccgctcctgacggtgttgcatattacttttggcgacaacggaccattaatggagaacatttacagtgccgacaccagtcgttccgcgatcgagcaagatgtggtgttgcactgtcggagcggcggcagttacgacgtgcattacagtattacgccgttaagtactctggacggcagcaatattggtagcgttctggtgattcaggacgttaccgaaagtcgcaaaatgctgcgccagctgagctacagcgcctcccatgatgcactgacgcatctcgccaaccgcgccagttttgagaaacaactgcgtatcctgctgcaaacggtaaacagtacacatcagcgacatgccctggtgtttatcgatcttgatcgctttaaagcggtgaatgacagcgccgggcatgcggcgggtgacgctttgctgcgcgaactggcgagcttaatgctgagtatgctgcgttccagcgacgtgctggcgcgactcggtggggatgaatttggtctgctgctaccagactgtaatgttgaaagcgcgcgttttatcgctacacgcattatcagtgccgtgaatgactatcactttatatgggaaggccgtgtgcatcgggtaggtgccagtgccgggattaccttgattgatgacaacaatcatcaggcggcagaagtgatgagccaggctgatatcgcctgttatgcctccaaaaatggtggccggggccgggtgacggtttacgaaccgcagcaagctgccgcacatagcgaacgggcggcgatgagccttgatgaacagtggcggatgattaaagagaatcagttgatgatgctcgcccacggtgtcgctagcccacggatcccggaagcgcgtaatttgtggctgattagtcttaagctctggagttgcgaaggcgagattattgatgaacaaacatttcgtcgtagcttcagcgatccggcgcttagccatgctcttgaccgccgggtattccacgaatttttccagcaggccgcaaaagcggttgccagtaaaggcataagcatctccctccccctttccgttgccggtttgagtagcgccacgctggtgaatgatctgcttgagcagctggaaaatagccctctaccaccacggttattacatctgattattccggctgaagcgattttagatcacgcagaaagcgtgcaaaaactgcggctggcgggatgtcggatagtgctcagccaggtgggccgcgatctgcaaatcttcaacagcctgaaagcgaatatggcagattacctgctacttgatggtgagttatgcgccaacgtgcagggtaatttgatggatgagatgctgattacgattattcaggggcacgctcagcgactcgggatgaaaaccatcgccgggccagtcgttttacccttagtgatggatacgctttctggcatcggcgtcgatctgatttatggtgaggtgattgccgatgcccaaccgctggatttgctggtgaatagtagttatttcgcgattaactgaggcgtgcttccccatcgcctgatgcgacgctaacgcgtcttatcatgcctacaaatcgctcattccccaggccggataaggcgctcgcaccgcatccggcgaccaacgtcatgcttcgtctggttgccagccttccgtataccagatatgcaacagcgcataagaacgccagggcttccagcgctcggcataacggcggatttgcgccggtgtcattcccggaaatcgctgtttaatcagataatcatccggcaggaaaacatctttcgcctgccagccacgcaaagcaaaataattcgccgtccagcgcccgatacccggaaaagtttgcagcgttttcatcgcctgctccacatcgcccggtattgtcattggtaaggtgccctccagcgccgcatttgccagatgaatcagcgcctctgcccgtttcaacggcatacctaacgcttttaatgcctgcgggtctgctgctgccagccgctgaggcgtcgggaagcagatatactccggaaaatcatccagccgttcgccataaagctgtgccactctggcggtcaattttgccgccatcgccacgctcaccagttggcctaaaatcgcccgcacgccctgctcaaaagcatcaacacagccgggtaaacgcaatccgggccgcgccgcgcctaacctgcccaacgcaccgttaacaatttgtgggttacattgcagatcaaacaggcggctcattttcgccagacactctgcggcaacaggttctaaacctgcacttaaatttatgtgcagagtatggcgggctatatccggaatagcagtcaccacgccgcgatattcgcccaccgccagactacgggcataataactgtccgcgaccgtttccacactgctcaccgcacgggcggcgagaaatcccaacatccagctccagtcatacggcggctgccagttcagggtatacatcgcatctccttattcatccgctttcagcataaacgttattcagacgctgcgctttgctttcatattccggttgtcgcgacggcaacatttcgctaaagtcacgccccttcttcaccggcatggggattatttcgtgtttattggttttgattacggtacagcaaactgtagtgtggcggtcatgcgtgacggtaaaccgcatttgctaaaaatggaaaacgacagcacgctgctgcctagtatgctttgcgcgccaacgcgtgaagcggtaagcgaatggctgtaccgccatcatgatgttccggcagacgacgatgaaacgcaggcgctgttacgtcgggcgattcgttataaccgcgaagaagatatcgatgttacggcgaaaagcgtgcagttcggtctttccagtctggcacagtacattgatgatccagaagaagtgtggtttgtgaaaagtccaaaaagcttcctcggtgccagcggcttaaaaccgcagcaggtagcgctgtttgaggatctggtctgcgcaatgatgttgcacattcgccagcaggcgcaggcacagctgccagaagcgattactcaggcggtgattggtcgtccgatcaacttccaggggctgggcggtgatgaagcaaacacccaggcgcaagggattctggaacgcgcggcgaagcgtgccggattcagggacgtggtattccagtacgagccggtcgcggctgggctggattacgaagccaccttgcaggaagaaaaacgggtgctggtggtggatatcggcggtggtacgactgactgtagtttgctgctgatggggccgcagtggcgtagccgtctcgatcgtgaagccagcctgctgggtcacagtggttgccgtattggcggtaacgatctggatatcgcgctggcgtttaaaaacctgatgccactgctgggtatgggtggcgaaaccgaaaaaggcatcgccctgccgatcctgccgtggtggaatgcggttgccatcaacgacgtacctgcgcagagtgatttctacagtagtgccaacggtcgtctgcttaacgatctggtacgcgatgcccgcgaaccggaaaaagtggccctgttacagaaagtctggcgtcagcgtttaagctatcgcctggtgcgtagcgcagaagagtgcaaaattgctcttagtagcgtagcggaaacccgcgccagtctgccgtttatcagcaatgaactggctacgctgattagccagcgagggctggaaagcgccctcagccagccactgacgcggattctggaacaggtgcaactggccctggataacgcccaggaaaaaccggacgttatctacctgaccggcggtagcgcccgttctccgctgattaaaaaagcgctggcagaacagttgccgggcattccgattgcaggcggcgatgactttggctccgtcaccgccgggctggcacgctgggcggaagtggtgtttcgttaattgaaaaatggctcagcagcggcttaaatctgcctgcgcctgagccagtttttctgctgcctgacgtaacggttccatcaacggcatggtccgtgctggagcatgaaggcggaatcgctgcaactctgtcgcgccgactgtcaacgcgctttccagccgatgtcgtttggcggtcattttcgccattaccgcttgtctgtctgctggcgttatcgcttcattcggcctgaacacaaaacggcgttcacagctcgctttccagtcgataaccgcctgggtcagatggtcgccaaaccctttcacttgcttaacgccacgacgggtaacatctgcggctgtttcaataccaaaagaccgtaacgccgctttacgcgcagggccaacgccgggaatagaggcaacatcaataaaaaatccctccagaaacttctgcttctgccgttcccttgcagtgtcatgaagtgctgccagagcgcgtttctcttcttccggtaacccgagaatttcgtccttcattttttcgagcatcgtccgtttggcgataaaaccttccaggccgcctacctgctggatctggcggactaaatggtcatagtccattttcgcacgattaaatgcctcacggcgttgctgaacttctgctttgtacgctttgcttgtcagactgccaataatccagatagccgccagcacaggaaccaaaataatataacgcggttctgcctgaaggccgcaaagcagcaggcttaatgcactcagtgcgatctcaagcagaatgatgtattcgcgccgtaacaggcctaaaggaagcggcctgccagtcggttggaaatgatcgggtaatggcagttgcaatgctggcggtgctacactcgccatcaccatcgcccagactttcgccagcacaaaattcccgccggtggtaatgacctcttcgccgagatcaataaaatagataacaccttgattatccagcgcacaccacgggcagtcagtcaaatgagcggggtaaacatgcattgcactaacgatacatttctttaactgttggcgtagagagtccagtgccgctacccacgctttagccgtcggacgcccggttgccacgccactttccgtgaatgcctgctgaaacatggcttcaacatcactcggtaacatgcttagcggaatagatcgtggcggcggttttaaaccacgtcgctgattatcactcgcgtaggcataacggaaatgggtaatatccgtctccagcgcattacccgcatcagagataagcggcacaccagaataaggatgccgcccaccaaacaagacgtgaaaaattagcaacgcaaggccaaaattatcgtgattttctgtgcgttcaaaaccgacaaaacttggcaaggtttgtagctctggcggcgtaaaatggctcacgccgacttcgcataaatgcagtgtgccattggcgttaatttgaaaggagtcgctatcaatcagtaccactttgctgtcgcgacctaccataaaactgttctggtttacgtcacccacgacgtgcccgtgctcgtgaaccgtagcaaaagaactagcaatattgcgcgcaacatagagtagaaaatcccacgcacaatgagggtaactctggcgacgatgtgccgggctatagatcatatgaatcggttctttaccagaaacttttggcatcataaaaccgataacttttccgcctcgtccaccgtgaagcgttgcctgcggccaggcgacataattcaacaactgcgcgtcagctgtcgcagccataaaggcaagtttgtcctgttttaaggcgggtggcggcgtgtgataaatcttggcgacgctatcgacaaactcctcgatatcataaaccgcgccttcaccacctttgcccagttcacggccaagagtggtcaattcacctgtgcttgtaaatacttttatatttgttttcataatatttcgcgggtagttatattatatttcaatgaataataacaactaaccattaaaattatttctatatggggaaaacccactcaagaataaaaatgataatgcaattttatcaggatacaattcaatttcggcctgataatgattaacttccacaggtttttgctaactttgactacaaagggattctggagaaaaaatgaaaaagatattacttatgttgagtctgctattttttactaccgcgggctttagtgaagttagcgatacgttagtgacgggaggttatgataaacaagcgatgtctgacgcgattaaacatgcgcggaaagaaaccgataaattcatcgaggttatgaataaaaaagatgccgatactttcgcagtcaaagccccgataaccgatcacggaagaaccgagcatttctggcttacggatgtcacttattctaacggcatgtttattggcgtaatcagcaatgaccctggtattgttacaaacgtagaatatggccaggagtggaaaatcaagaaagaagatattagtgactggatgtatacgcgcggggataaaatttacggcggttataccattgatcctttattggtcacctatccaaaagaagaagccgacgagctaagagcaaaattagttcgctaatcagccgttatatttattgtttaaactggcggttgaattgttgtcttcaaccgccatgagaaactcactctgcccacagcgccagtgccaacgttttatcatcatccgtacgctcgtttaccgccgggctggacaaaaactgctttaacaattcaggtaataaatcgagttgttcctgcgttgctgccgccagtccattgaaaaacggggtaaagaaaggcacatgaggagaattatccagcatatttaacgccagtcgctggataccatccgtaaatgctgcaactttgtgcgcacgcccagtgctggtgagagtttccagtctggaaacggcatcttcgtcggtaatgaagtgcgtcatgttggcatattcacccgccatcggcgtgagaggcaattgcagaccgtgacccaaatctaccaccacgccgccatcgccaatctgcataatcaaggtgccgtcagggctactaatcagtcccagaaatgtgcaggcaaaatcgcgaaccgctaattctttggcttccgcctcggcaaaaagtcgttgacgaatggtcagtaccatatttgtggcgaggacatcattaagccccaattccccgccctgcactttttggctcatataagccatcgcttcattgacggcgagcatcgcgccttcgccaccctggctgacactgcctgcgccatcagcgacaaatacgctcaataatggctgctggtcatttaaccaggcaatctgcatctggcaggcatcctgacaaggcaagtccgcgctgatgtggctcgttccaacggtacttgcatagaccagacgccagctcacacactcgtccagccttttggcgcttccagcacaacttccgttcccggcgtggagcgggaaacgctacgcaggctactggataaccagctaaacagttcacggaattgtaatccttgcagaggcaaaggctgacgaacgctaatttgtgccagcgtcttcatatccgccccctgaacaccgatggaaaagaaagcaaaccttttatcttcttccccccgaaacactttgttggctgcagcctgccactcatcggttggtgcaccatcggtaatcaggaaaatccacgggcgataatagctaataccatttgcacgatactcacgtttccgctcctctaccatatccagggctttggtaatggccgcacccattggtgtatcgccctgggcaaacaggatgggcggaaaaaaattagcggcgctggtaaagggttgttccacatgcaccgggccgaacgtcacaatgccgagttccactctttttaaagccagcggatcagcaagcagttcatcacgaaaggtaaccaatccggcgttaagttcattaataggtctaccgttcatagaaccagaaacatccagcagcaaaatgcaggggcaacgtggttccgggttactggcaaaatcgctggtggcaaacgtgatttgttcgctcataagaaatcctttcttagagaattatcgaggtccggtatcataccgactgcaataatgaaataagagcaaacgaagaaactttcagaattaggcccggcggcgcagaaaattttgctattcgcctcgcaagaacggagagccgtcgattgacactaagggcggagtgacataatttcaggagtgagggttagggagaggtttccccctccccctggtgttcttagtaagcctggaagctaatcactaagagtatcaccagtatgatgacgtgcttcatcataaccctttccttattaaaagccctcttctccgggagaggctttcccgtttcagcgtcccgctgaaatcatcggcttacctcctttcgccctgaatgcagtctatcgctaacgcgtgaataaaatagtttcctctgtgattattgcgtaacgactcgcaaagaatatttgctggcaggatcgcagactacaaagcctgcggattgacaatcttatcgtgaagacatactttcaggagtgagggtagagcggggtttcccccgccctggtagtcttagtaagcggggaagcttatgactaagagcaccacgatgatgagtagcttcatcatgaccctttccttatttatggccccttcctcgggaggggctttcccgtttcagcgtcccgctgaaatcgtcggcttacctcctttcgccatgcaagcagtctatcgctaacgcgtagataaaatagtttcctgtgttattactggatgcgtgctcgcaaatgtgcccgtcattcagacgattccagacagtgtttcataattcctccatttttctcccttattggctggctacactagtatcattccgcgaaacgtttcaggaagagaaactcttaacgatgaaaggtagttataaatcccgttgggtaatcgtaatcgtggtggttatcgccgccatcgccgcattctggttctggcaaggccgcaatgactcccggagtgcagccccaggggcgacgaaacaagcgcagcaaagcccagcgggtggtcgacgtggtatgcgttccggcccattagccccggttcaggcggcgaccgccgtagaacaggcagttccgcgttacctcaccgggcttggcaccattaccgccgctaataccgttacggtgcgcagccgcgtggacggccaactgatagcgttacatttccaggaaggccagcaggtcaaagcaggcgatttactggcagaaattgaccccagccagttcaaagttgcattagcacaagcccagggccaactggcaaaagataaagccacgcttgccaacgcccgccgtgacctggcgcgttatcaacaactggcaaaaaccaatctcgtttcccgccaggagctggatgcccaacaggcgctggtcagtgaaaccgaaggcaccattaaggctgatgaagcaagcgttgccagcgcgcagctgcaactcgactggagccggattaccgcaccagtcgatggtcgcgttggtctcaagcaggttgatgttggtaaccaaatctccagtggtgataccaccgggatcgtggtgatcacccagacgcatcctatcgatttagtctttaccctgccggaaagcgatatcgctaccgtagtgcaggcgcagaaagccggaaaaccgctggtggtagaagcctgggatcgcaccaacagcaagaaattaagtgaaggcacgctgttaagtctagataaccaaatcgatgccactaccggtacgattaaagtgaaagcacgctttaataatcaggatgatgcgctgtttcccaatcagtttgttaacgcgcgcatgttagtcgacaccgaacaaaacgccgtagtgatcccaacagccgccctgcaaatgggcaatgaaggccattttgtctgggtgctgaatagcgaaaacaaggtcagcaaacatctggtgacgccgggcattcaggacagtcagaaagtggtgatccgtgcaggtatttctgcgggcgatcgcgtggtgacagacggcattgatcgcctgaccgaaggggcgaaagtggaagtggtggaagcccagagcgccactactccggaagagaaagccaccagccgcgaatacgcgaaaaaaggagcacgctcctgatgcaggtgttacccccgagcagcacaggcggcccgagccgcctgtttattatgcgtcctgtggccaccacgctgctgatggtggcgatcttactcgccgggattatcggttatcgcgccctgcccgttagcgcgctgccggaagtggactatccgaccattcaggtggtcacgctctacccaggtgccagcccggatgtcatgacctctgccgttaccgcgccgctagaacgccagttcgggcagatgtctggcctgaaacagatgagcagccaaagttccggcggtgcgagtgttatcactttgcagttccagctaacattaccgctcgatgtcgccgagcaggaagtgcaggccgcgattaacgctgcgaccaacttgttgccgagcgatctgcctaacccgccggtttacagcaaagtgaacccggcagatccgccgatcatgacgctcgccgtcaccagtaccgccatgccgatgacgcaagtggaagatatggtggaaacccgcgtcgcgcagaaaatcagccagatttccggcgtcggcctggtgacgctttccggcggtcagcgtccggctgttcgcgtcaaacttaacgctcaggcgattgccgccctcggcctgaccagcgaaaccgtgcgcaccgccattaccggcgctaacgttaacagcgcaaaaggtagcctcgacggcccttcccgtgcggtcacgctttccgcgaacgaccagatgcaatccgccgaagagtatcgccagctaatcatcgcctaccagaacggcgcgccaattcgtctgggcgatgtcgcaactgtagagcaaggtgcagaaaacagctggctcggcgcgtgggcgaacaaagaacaggccattgtgatgaatgttcagcgccagcccggtgctaacattatctccaccgccgacagcattcggcagatgctgccacagctcactgagagtctgccgaaaagcgtgaaggtgacagtgctttccgatcgcaccaccaatatccgcgcatccgtcgatgatactcagtttgaattgatgatggctatcgcgctggtagtcatgattatctacctgtttttgcgcaatattccggcgaccatcattcccggtgttgctgtaccgctgagcttaatcggcactttcgcggttatggtgtttctcgattttagtatcaataacctgacactgatggcgttaactatcgccaccggattcgtggtcgatgacgccatcgtggtgatcgaaaacatttcccgctatatcgaaaaaggcgaaaaaccgttggcggcggcgctcaagggcgcaggtgaaatcggctttaccattatcagcctgaccttcagtctgattgcggtgttgatcccactgctgtttatgggcgatatcgtcgggcgactgttccgcgaatttgctattaccctggcggtagcgattttgatcagtgcggtggtgagcctgaccctgacaccgatgatgtgcgcgcggatgctcagccaggagagcttgcgtaaacagaaccgcttctcccgtgccagcgaaaaaatgttcgacaggataatcgccgcctatggtcgtggactggcgaaagtgctgaatcatccgtggctgaccttaagcgtggcactcagcacgctgctgcttagcgtgctgctgtgggtgttcattccgaaaggtttcttcccggtacaggacaatggcattattcagggcactttgcaggcaccgcaatccagctcctttgccaatatggcccagcgacaacgccaggtcgcggacgtgattttgcaggatccggcagtgcaaagcctgaccagttttgttggcgttgatggcactaacccgagcctgaacagtgcacgtttacaaatcaacctcaaaccgttggatgaacgtgatgatcgggtgcaaaaagtcatcgcccgtctgcaaacggcggtagataaagtgccgggcgtcgatctcttcctgcaaccaacgcaggatctgactattgatactcaggtcagccgcacccagtaccagtttaccttgcaggccacgagtctggatgcgctcagtacctgggtgccacagttgatggaaaaactccagcaactgccacagctttctgatgtctccagcgactggcaggacaaagggctggtggcgtatgtcaatgttgatcgcgacagcgccagccgtctggggatcagcatggcggatgtcgataacgccctgtacaacgcgtttggtcagcggctgatttccactatttatactcaggccaaccagtatcgcgtggtgctggagcacaacaccgaaaataccccaggcctcgcggcgctggataccattcgcctgaccagcagcgacggcggcgtggtgccgctaagcagtattgccaaaattgagcagcgttttgcgccgctctccatcaaccatctggatcagttcccggtaacgaccatctcctttaacgtgccggataactatagcctgggcgatgcggtgcaggcgattatggacaccgaaaagacgctgaatctgccggtggatatcaccacgcagttccagggcagcaccctcgccttccagagcgcgctgggcagcactgtctggctgattgtcgcggcggtggtggcgatgtatatcgtgctcggcattctgtacgagagctttattcacccgatcaccattctcagcacgctacccaccgcaggggttggcgcactgctggcgttgctgattgctggtagcgaactggatgtgattgcgattatcggcattattttgctgatcggtatcgtgaagaagaacgccatcatgatgatcgacttcgcgctggctgctgagcgcgagcaaggcatgagcccgcgcgaggcaatctaccaggcttgtctgttgcgttttcgtccgatcctgatgaccactctggcggctctgcttggcgcgctgccgctgatgttgagtaccggggtcggcgcggaactgcgtcgtccgttaggtatcggcatggtcggcggtctgattgtcagccaggtgctgacgctgtttaccacgccggtgatttatttgctgttcgaccgcctggcattgtggaccaaaagccgctttgcccgtcatgaagaggaggcgtaagtgaagttttttgccctcttcatttaccgcccggtggcgacgattttactgagcgttgccattaccctgtgcggcatactgggcttccgtatgctgccggtcgccccgctgccgcaggtcgattttccggtgattatcgtcagcgccagcctgcccggtgcgagtccagaaacaatggcgtcttccgttgccacgccgctggagcgcagtcttgggcgcattgccggagtcagtgaaatgacctccagcagtagcctcggcagcacgcgtattattttgcagtttgattttgaccgggatatcaacggcgcagcgcgtgatgtgcaggcggcgatcaacgctgcacaaagtttgctgcccagtgggatgcccagccgcccgacctatcgcaaagcgaacccgagcgatgcgccaattatgatcctcacgctgacgtccgatacttatagccagggtgaactgtacgatttcgccagcacgcagctggctccgacgattagccaaatcgacggtgttggtgatgtcgatgtcggaggcagcagtctgcccgccgtacgcgtcgggctgaatccgcaggcgctgtttaatcagggcgtgagcctggacgacgtacgcaccgccgtcagcaatgccaacgtgcgtaaaccgcagggcgcgctggaagatggcactcaccgctggcagatccagaccaatgatgagctaaaaaccgccgctgaatatcagccgttgattattcactacaacaacggcggcgcggttcgtctgggcgatgtggcgacggtgaccgacagtgtgcaggatgtgcgcaacgccgggatgaccaacgccaaaccggctattttactgatgatccgcaaactgccggaagccaatattatccagacggttgacagcatccgggcaaaattaccggagttgcaggaaaccattccggcggcgattgatctgcaaattgcccaggatcgctcccccaccattcgcgccagcctggaagaagtcgagcaaacgctgattatcagcgtggcgctggtgattctggtggtgtttttattcctgcgcagcggtcgcgccactattattcccgccgttagcgtgccggttagcctgattggtacgtttgcggcgatgtacctgtgcggattcagtctcaataaccttagcttaatggcgctcaccatcgctactggtttcgtggtggatgacgccatcgtggtgctggaaaacattgcacgtcatctggaagcgggaatgaaaccgttgcaagccgcactgcaaggtactcgcgaagtcggttttacggtgctgagcatgagtctgagtctggtggcggtgttcctgccgctgctgttgatgggcggattgccgggccgactgttacgcgaatttgccgtgacgctttctgtcgccattggtataagcttgctggtttctctgacattaacgccaatgatgtgtggctggatgctgaaagccagcaagccgcgcgagcaaaagcgactgcgtggttttggtcgcatgttggtagccctgcaacaaggctacggcaagagtctaaaatgggtgctcaatcatacccgtctggtgggcgtggtgctgcttggcaccattgcgctgaatatctggctgtatatcagcatcccgaaaaccttcttcccggagcaggacactggcgtgttgatgggcgggattcaggcggatcagagtattagctttcaggcgatgcgcggtaagttgcaggatttcatgaaaattatccgtgacgatccggcagtggataatgtcaccggctttacaggcggtagccgagtgaacagcgggatgatgtttatcaccctcaagccacgcgacgaacgcagcgaaacggcgcagcaaattatcgaccgtctgcgcgtaaaactggcgaaagaaccgggggcgaatctgttcctgatggcggtacaggatattcgcgttggtgggcgtcagagcaacgccagctaccagtacacgttgttatccgacgacctggcggcactgcgagaatgggagccgaaaatccgcaaaaaactggcgacgttgccggaactggcggacgtgaactccgatcagcaggataacggcgcggagatgaatctggtttacgaccgcgacaccatggcacggctgggaatcgacgtacaagccgccaacagtctgttaaataacgccttcggtcagcggcaaatcagcaccatttaccagccgatgaaccagtataaagtggtgatggaagtggatccgcgctatacccaggacatcagtgcgctggaaaaaatgttcgttatcaataacgaaggcaaagcgatcccgctgagctatttcgctaaatggcaaccggcgaatgccccactaagcgtgaatcatcagggattaagcgcggccagcaccattagctttaacctgccgaccggaaaaagcctcagcgacgccagtgcggcgatcgatcgcgcaatgacccagcttggtgtgcctagcacggtgcgcggcagttttgccggcacggcgcaggtgttccaggagacgatgaacagccaggtgatcctgattatcgccgccatcgccacggtgtatatcgtgctgggtatcctttacgagagttacgtacatccgctgacgattctctccaccctgcccagcgcgggcgttggagcgctgttggcgctggagctgttcaatgccccgttcagcctaatcgccctgatagggatcatgctattaatcggcatcgtgaagaaaaacgccattatgatggtcgattttgcgcttgaagcccaacggcacggtaacctgacgccgcaggaagctattttccaggcctgtctgctgcgttttcgcccgattatgatgactaccctggcggcgctgtttggtgcgctgccgctggtattgagcggcggcgacggcagcgagctgcggcaacccctggggatcaccattgtcggcggactggtaatgagccagctccttacgctgtataccacgccggtggtgtatctctttttcgaccgtctgcggctgcgttttagccgtaaacctaaacaaacggtaaccgagtaaatgacagatcttcccgacagcacccgttggcaattgtggattgtggctttcggcttctttatgcagagcctggacaccaccatcgtaaacaccgcccttcccagtatggcgcaaagcctcggggaaagtccgttgcatatgcacatggtcattgtctcttatgtgctgaccgtggcggtgatgctgcccgccagcggctggctggcggacaaagtcggcgtgcgcaatattttctttaccgccatcgtgctgtttactctcggtagtctgttttgcgcgctttccggcacgctgaacgaactgttgctggcacgcgcgttacagggcgttggcggcgcgatgatggtgccggtcggcagattgacggtgatgaaaatcgtaccgcgcgagcaatatatggcggcgatgacctttgtcacgttacccggtcaggtcggtccgctgctcggtccggcgctcggcggtctgctggtggagtacgcaagctggcactggatctttttgatcaacattccggtggggattatcggtgcgatcgccacattgctgttaatgccgaactacaccatgcagacgcggcgctttgatctctccggatttttattgctggcggttggcatggcggtattaaccctggcgctggacggcagtaaaggtacaggtttaagcccgctgacgattgcaggcctggtcgcagttggcgtggtggcactggtgctttatctgctgcacgccagaaataacaaccgtgccctgttcagtctgaaactgttccgtactcgtacctttagcctgggcctggcggggagctttgccggacgtattggcagtggcatgttgccctttatgacaccggttttcctgcaaattggcctcggtttcagcccgtttcatgccggactgatgatgatcccgatggtgcttggcagcatgggaatgaagcgaattgtggtacaggtggtgaatcgctttggttatcgtcgggtactggtagcgaccacgctgggtctgagcctggtcaccctgttgtttatgactaccgccctgctgggctggtactacgttttgccgttcgtcctgtttttacaagggatggtcaacagcacgcgtttctcctccatgaacaccctgacgctgaaagatctcccggacaatctggcgagcagcggcaacagcctgctgagcatgattatgcaattgagcatgagtatcggcgtcactatcgccgggctgttgctgggactttttggtagtcagcatgtcagcgtcgacagcggcaccacacaaaccgtctttatgtacacctggcttagcatggcgttgatcatcgcccttccggcgttcatctttgccagagtgccgaacgatacgcatcaaaatgtagctattagccggcgaaaaaggagcgcgcaatgaagttctggcgacccggtattaccggcaaactgtttctggcgattttcgccacctgcattgtcttgctgatcagtatgcactgggcggtgcgtatcagttttgagcgtggctttattgattacatcaagcatggtaatgaacagcgattacaactgttaagtgatgcgcttggcgagcagtatgcgcagcatggcaactggcgcttcctgcgcaacaatgatcgctttgtctttcagatcctgcgtagttttgaacacgataatagcgaagataaacccggcccgggtatgccaccgcacggctggcgtacccagttctgggtggttgatcaaaacaacaaagtgctggttggtccgcgagcgccgattccacctgacggtacacggcgacccattctggtcaacggtgcggaagttggcgcggtgatcgcctcccccgttgagcggttaacgcgcaatactgatatcaatttcgataaacaacagcggcaaaccagctggttgattgtcgccctggcaacgttactcgcggcacttgccacttttctgctggcgcgcggtttactggcaccggtaaaacgacttgtcgatggcacgcacaaactggcggcgggcgatttcactacccgcgtaacgcccaccagtgaagatgaactgggcaaactggcgcaagacttcaaccagcttgccagcacactggagaaaaaccagcaaatgcggcgcgattttatggccgatatttctcacgaactgcgtacgccattagcggtgctgcgcggtgaactggaagccattcaggatggcgtgcgtaaattcacgccggagacggtggcgtctttacaggcggaggtcggtacactgaccaaactggttgacgatctccatcagttgagcatgtctgatgaaggcgctctcgcctatcaaaaagcaccggtagatttgatcccactgctggaagtggcgggcggcgcatttcgcgaacgattcgccagtcgtggcctgaaactgcaattttccctgccagacagtattaccgtatttggcgatcgcgaccgtttaatgcagttattcaataacttactggaaaacagcctgcgctacactgacagcggcggcagcctgcaaatctctgccgggcagcgcgacaaaacggtgcgcctgacctttgccgacagtgcgccaggtgtcagtgacgatcagctacaaaaattgtttgaacgtttttatcgcaccgaaggttcccgcaaccgtgccagcggcggttccgggctggggctggcgatttgcctgaacattgttgaagcacataatggtcgcattattgctgcccatagcccttttggcggggtaagcattacagtagagttaccgctggaacgggatttacagagagaagtatgaccgagttaccaatcgacgaaaacacaccgcgtattttgatcgtggaagatgaaccgaagctggggcagttgctcattgattatctgcgtgctgcgagctatgcgccgacgcttatcagccacggcgatcaggtactgccgtatgtgcgccagacaccaccggatctgatcctgttagatctgatgctccctggcaccgatggcctgacgctgtgccgggaaattcgtcgtttttctgacattccgatcgtgatggtgacggcaaaaatcgaagagatcgatcgcctgctggggctggagattggcgcagatgattatatctgtaagccgtacagcccacgggaagtggtagcgcgcgtcaaaaccattttgcgccgttgcaaaccgcagcgcgagttgcagcaacaggatgctgaaagcccgttgattatcgacgaaggtcgttttcaggctagttggcgcggtaaaatgcttgacctgacgcctgcggaatttcgtctgctgaaaacgctctctcacgaaccaggaaaagtgttctcccgcgagcaattgctcaatcatctttatgacgactaccgcgtagtaaccgaccgcaccatcgacagccacattaaaaacctgcgccgcaagctggaatctctcgacgccgaacagagttttatccgcgccgtttatggcgtcggttaccgctgggaagccgacgcctgccgcatcgtttaattttagcgacattattttgttagccggagatggcgttcagaccagatccggcaacattatcccacgcatggtcagcaaactgacattatctctccgccctggcaggcatcagaaaatcgctcatactttaatcggtaaacagcacctttagaatcctgtcgtttgttttcgatttcaaaatataatgaaattatttgtttttaaatatcgagataacgatcacaaaaacgacaatatgaaaattattcgaggagtgaaaggcaaaaaaacggcctcccgatagggaagccgtagcaaagtgcgcgtgtttttatgccggatgcggtgtaaacatacgtggcagtgctatgtaggcatgataagacgcttcagcgtcgcatcaggcataggttgccggatgcagcgtaaacgccttatccgtcctacggggtggtgttgttcgtataaggcgtatcaggcgatagtaattttgctatcgagataaacgtcctgcacggcgttaatcagtttcacgccgtcagccatgcttttcttgaacgctttacgtccaagaatcagccccattccgcctgcgcgtttgttgataaccgcagtacgcactgcatcgctgaggtcagtttcaccgcccgcagcaccgccggagtttatcaacccagcccgacccatatagcagttagctaactgataacgcaccagatcaatcgggttttcgctggtcaatttgctgtaaacacgatcgtcggtgtaaccgtaattaattgctttatagccgccgttattttccgccattttttgtttgacgatatctgcaccgatggttgccgccagatggtttgcctgaccggtcaggtcggcggaaacatggtaatcaacgccatctttcttaaaggcggagttacgcaaataggcccacagcactgtcaccatacccagctcgtgcgcacgttcaaaagccgcagaaatttcttcaatctggcgacgactctcttcgctgccaaaatagatagtcgcaccaaccgcaaccgcgcccatgttgaacgcctgctccacgctggcatacagcgtttgatcgtaggtattcgggtaacttagcgtctcgttgtgattaagtttgacgaggaatggaatgcgatgcgcataacgccggcttacgctcgccagcacgccgtaagtactcgccacacagttacagcccgcttcgatcgccagttcaacaatgtttttcgggtcaaagtagagcgggttagcagcaaaactagctccggcagagtgctcaacgccctggtcaaccggcagaatagaaagatatcctgtgccagccagacgcccggtgttgtacaacgtctgcatattacgtaacaccgctggcgggcgattattgtcaatcattacgcggtctacgtagtcatgtccggggagataaagctggtcagaaggaattgtcatacaacggtgctgtaaaaggttgtcggcgtctttgccaagcaactgcgcaatatctgtcattactatgctcccgtaaattccgattggatatcggctatggattgtcctggcccgccttttgcgggcaatcataatcctggtcgttacgggcgagtttttccatcttttggatgttttttcagcgttttctgttggctcgattcatcagaaaaaatgttagcgcggtcaagttttcaccgcaaaggtatttaaaaggtattattaagtggtattgtcatcgcgtaccttacattacctgtcatgaaggaattaaaagatgaaaacaacagcaaagctgagcttcatgatgtttgttgaatggtttatctggggcgcgtggtttgtgccattgtggttgtggttaagtaaaagcggttttagtgccggagaaattggctggagctatgcctgtaccgccattgcggcgatcctgagcccaattctggttggctccatcactgaccgctttttcagcgcgcaaaaagtgctggcggtattgatgttcgcaggcgcgctgctgatgtatttcgctgcgcaacagaccacttttgccgggttcttcccgttactgctggcctacagcctaacctatatgccgaccattgcgctgactaacagcatcgcttttgccaacgtgccggatgttgagcgtgatttcccgcgcattcgtgtgatgggcactatcggctggattgcctccggtctggcatgtggtttcttgccgcaaatactggggtatgccgatatcagtccgactaacatcccgctgctgattaccgccggaagttctgctctgctcggtgtgtttgcgtttttcctgcccgacacgccaccaaaaagcaccggcaaaatggatattaaagtcatgctcggcctggatgcgctgatcctgctgcgcgataaaaacttcctcgtctttttcttctgtagtttcctgtttgcgatgccactagcgttctattacatctttgccaacggttatctgaccgaagttggcatgaaaaacgccaccggctggatgacgctcggccagttctctgaaatcttctttatgctggcattgccgtttttcactaaacgctttggtatcaaaaaggtattattgcttggtctggtcaccgctgcgatccgctatggcttctttatttacggtagtgcggatgaatatttcacctacgcgttactgttcctcggtattttgcttcacggcgtaagttacgatttttactacgttaccgcttacatctatgtcgataaaaaagcccccgtgcatatgcgtaccgctgcgcaggggctgatcacgctctgctgccagggcttcggcagtttgctcggctatcgtcttggcggtgtgatgatggaaaagatgttcgcttatcaggaaccggtaaacggactgactttcaactggtccgggatgtggactttcggcgcggtgatgattgccattatcgccgtgctgttcatgatttttttccgcgaatccgacaacgaaattacggctatcaaggtcgatgatcgcgatattgcgttgacacaaggggaagttaaatgaaaacagaacgtattctcggtgctctttatgggcaggcgttaggggatgcgatggggatgccctccgagctttggccacgcagccgcgttaaagcacactttggctggattgaccgttttcttcctggaccaaaggagaataacgcggcctgttattttaaccgcgccgaattcaccgacgataccagcatggcgctgtgtctggcggatgcgttactggaacgtgaaggcaagatcgatccggatctgattgggcgtaatattctcgactgggcgctgcgtttcgacgcctttaacaaaaacgtactaggtccgaccagcaagattgcgcttaacgccattcgcgacggtaaacccgttgctgaactggaaaacaacggcgtgaccaacggcgcagcgatgcgcgtcagcccattaggttgtttgcttccggcgcgtgatgttgattcctttattgatgatgtagcgctggcgtccagcccgacccataaatccgatctggcggttgcaggcgcggtagtcatcgcatgggcgatttctcgtgccattgacggagaaagctggagtgcgattgttgattccctgcctagtattgcgcgacatgcacagcaaaaacgcatcactacgttcagcgccagtctggcggcgcggctggagattgcgctgaaaattgtgcgcaatgccgacggcaccgaatccgccagcgaacagctttaccaggtcgttggcgcaggtaccagcactattgagtccgttccgtgcgccattgcgctggttgaactggcacaaaccgacccgaatcgctgcgccgtcctgtgcgctaaccttggcggcgacacagacaccatcggtgctatggcgacggcaatttgcggcgcgttgcatggcgttaacgctatcgatcctgcgttaaaggcggaactggatgcggtaaatcagcttgatttcaaccgctatgccacagcgctggcgaaatatcgtcaacaacgggaggcggtatgagcggcgctcgattacacacgctgctgcctgaattaaccacgcgtcagagcgtgatggtcgtcggcgcggcggtcattgacgtgatcgccgacgcttatgccctcccctggcgtgggtgcgatatcgaactgaaacagcagagcgttaacgttggcggctgcgcactgaatattgccgtggcgttaaagcgcctcggcatcgaagcgggtaatgccttgccgctcggtcagggcgtgtgggcggagatgattcgcaaccggatggcaaaagagggcttaatcagcctgatcgataacgccgaaggtgataacggctggtgtctggcgctggttgagccggatggcgaacgcacttttatgagtttcagcggtgttgaaaatcagtggaatcgccagtggctggcgcgattaaccgttgcgcctggcagcctgctctatttttccggttatcaactggccagcccctgcggcgaattgttagtggaatggctggaagagctgcaagacgtgacgccgtttatcgattttggcccacgtattggcgatatcccggatgcattactggcgcggatcatggcctgtcgacctttagtgagcctcaatcgtcaagaggctgagattgccgccgaacgttttgctttatccgcagagataacaacacttggcaagcaatggcaggagaaatttgccgcgccgttgatcgttcgtctcgataaagaaggcgcatggtatttcagcaacgacgcttctggctgcattccggcatttccaacgcaagttgtcgacaccattggggcgggcgacagtcatgccggtggcgtacttgccgggctggcctctggtctgccactggcggatgccgtattactgggcaatgcagtggcgagctgggttgtcgggcatcggggcggtgattgtgcgccaacgcgcgaggaactactcctcgcacacaaaaacgtataattactcctcgcacacaaaaacgtatagatcgctgcgacagtggctaatgctgtactcaataggccgttgctgttggtcaagcgccacttgcttgatcaccagcaccggtattttgctatctaactgaatatgactctgaaactcggcatccggcatccgggcgctaacgcgggaacgcgtacgttgtgggtaaatgtgctggctgcggaaatagtcataaagactaatcccgatggcatcaacatcatgaattaaatgcgccggaacccagctttcctcaatgcttaccgcttcttcatcgacatagcgaatacgcttaagcaaaaagacatcacttcctgcttcgaccgccagctgctgcgcgacttcttcgggacatttcacgacacgcttgttaacccatagcgtatcgggctttttcccgcgcaataccacctgctgagaaaaacctcgcgcttctttcaagctgtattcgaagatgttgttgatctgcgtgccgtaaccgcggctacgcgtcaccacaccctcttcttccagcgcctgcatcgccttgcgcaccgtaatgcggctaacgccggttaactgacttaaatcacgttcaccgggcaaaatattgccatgctccagcaccccgctgcgcacggcattttttaccgtttcggcaaacttaatataaagcggcgtgttatccgccgctaaaatacgctcgttcagttgggcaatcagctgggtatgcgcttgttccatttgtctttttcctgccggggagtctggtgggagtatatcactgcttcttatttaaggcgtttctttaatcccatcaacgaatgcctgcaactcctccaccgtgccattaaatacattaaaatccaccggaccattgatgccatctacctgtccacggtcggaatgctgccagaagcgccaggccattccgtcattgtccggacgacgttgatagtagtgagccacccaccacggatattcattgaaatagcccgccagattggtgtgataaaaaacggctccactgtaaataatcggctttttccccgtacttttttcgaccatttttagccactgacttacccgcttgcgtaattcttttgcgcttaattttccccgttcttctacgtccagcacggcagggaaatcgccttgactgaaatccaccgtttgcagaaataatctcgcctgaacactagcggatacgctcggggagaaataatgatacgccccacgcagcaggccattttcgcggcttagttgccagttacggctaaaataggggtccaccagcttttcgccttccgtcgccttaataaaagcaaactgtaagcggataccattgtcgcgcatttttgccacccgctgccagtcgatccgctcctgccagcggctaacatctattccgtgaatggtgtaactggcaggaatgcgaatagcgaaagatttaaccgggcgataaccgtagaagtggatgtagtctgtaatctgaactgctgtgctatagaaaaaattcaccgtctgacgcggataaattgcaacgatggaaattagcccaagagcgcataatagagaggtgagtttttttcgactggtaattcttagctgcattggtttcatccctgaatgtcagtgccaaaggctgacaataaccaaagcagctatagtacggcgctcaccaccaggcgtggaagtggtgaaccggaccaataccgtgaccaacttccagcgtgtcggcctgggctaacgcgctactaagccagctttttgcctcctgtacggtgtcagcccagtttgtatggcgcgggcgtagtgcagccaacgccgcagagagtgtacaaccagtgccgtgggtgtttttggtcataatgcgcggtgcggtaaaccgttgttcaccctcgcgggtaaacagccagtccgggctttgctcatcatccagatgaccacctttcattagcactgcgccacagcccatcgccaacaggcttcgcccttgttccagcatttcctgttcggtgcgcgcgtgtggcgcgtcgagcaaggcggcagcttcgggcaagtttggcgttattaaactaacctgtggcaataatcgactgcgcagcgtagcaaccgcgctaggactaagcagcgggtcgccgctttttgccagcataacggtgtcgagtaccacgttttggatctgataacgttgcaaccgttctgccaccgcttcaacaatatcggtttccgccagcataccgattttagtggtatcgattcgcacatcgctgaacacgctatcgagctgggcggcgacaaaatcaggctcaatgcgatacacgctctgtacgccacgggtattttgcgccaccagtgcagtaataacactgcaaccataagcgccaagtgcgctgaaggttttaagatcggcctgaatccccgcaccaccactcggatcagtaccggcaatcgtcagagcgttaattcgtttcatgcctgcacctcctgcgtcaattgccagagcgcatcaaggaaatgtggaacaaaactgcctggcccctcgcttctggcgactgcgcgttctccggcttgtttcatccagtgacaggcagatgcgacattttccagcgtatcgcctggtaacgcacagcaggcagcgacaaccgcgcttaatgcacagccagttcctaccactttggtcattaacggatcaccaccgtgaataccaatgatacgatgtccatcggtaacataatccatctcgccagtgaccacgacgattgcgccagtttcccgtgccagtgtttgtgcagcgggtatcgcgttagctgcggcgtcagtggtatccactccccgtccgccattagcaatgccagctaatgccatgatttcgctagcattaccacgtatcgctgccggtttaaaagataaaagttcatgacaaaaatggcggcgataatcgagcgcacccaccgctactggatcaagcgtccagggtgtttgagagctttttgcttgctcaacggcagcacgcatcgcctgagcgcgtggctgcgtcagtgtgccaacgttaatcaacaaggcactggcgatagccgcaaactgactggcctcttcggtttcgataaccatcgctgggcttgcaccgagcgccagcaaggtattggcggtaaaggtttgcaccacatcattggtcatgcagtgcacaagaggggaatgttggtgaaaaaggtgtaacgcgtgcgcagattgcgcactacccagcaggtcgacttgcatagtttgctcctgccataacgtgaagaagcaatgacctggtggtccgtgacttccctacgctggcattatccagatcaggtgatacgggtatttctcagccttcacgcagaagggcaccccgagtcgtttggttgcgatgataaatcgcagaggaggatggtaatgtccagcgcacgcgttgtaaacgaggaaaaacggcagttttacaatcgcgttaataaattatttgatataactatccagcaccttcagaacgacatccagatcttcttcacgttttagctcatccccctggtgaacgatgtgttccgtcagatgacctttaatcacttcccgcatcagaccgtttaccgcgccacggatagcagcaatctgttgtaaaactgcagcgcattcgtgcggctcgtcgagcattttcttgagcgccacgacctggccctgaatcttactggcacgcgctttcagtttctgtttatcacggattgtatgagacatggcaacacctggttaacaagaatatgaaaaatcatagcactattaatctactggggggtagtatcaggtactgggggggagtagaatcagattgccgaattaatactaagaattattatcatgaccgaatttacaactcttcttcagcaaggaaacgcctggttcttcatccccagcgccatcttacttggtgcgcttcatggcctggaaccagggcacagtaaaacgatgatggcggcgtttatcatcgccatcaaaggcaccattaaacaagcggtgatgctcggactggcagcaactattagccataccgcagtggtctggttaattgcctttggcgggatggtgatcagcaagcgctttactgctcaaagtgcagaaccgtggctccagctgatttccgcagtgatcattattagcaccgcgttctggatgttctggcgtacctggcgcggcgaacgcaactggctggagaatatgcacgggcatgattatgagcatcatcatcacgatcacgaacatcaccacgaccatggacatcatcaccatcacgaacatggcgagtatcaggatgcccatgcacgagcccatgccaatgacattaaacgacgctttgatggtagagaggtcaccaactggcaaattttgttatttggcttaaccggtggccttatcccctgcccggcagcaattaccgtgctgttgatatgcattcagttgaaagccctgacactgggcgcaacactggtcgtcagtttcagcattggcctggcgttaacgcttgtcaccgtaggcgttggcgcagcaatcagcgttcagcaggtcgcaaaacgctggagcggatttaacactctcgctaaacgcgccccctatttttccagtctgttgattggcttagtcggtgtgtatatgggcgtacatggcttcatgggcataatgcgataactcaatcctttaggcttgcatgttatcttcagcccaggatgattcttaaatcagctatttccgctgactctctgctcgctaaggatgcttttagggcatcctttcatttacactttttacgaaatcatgggatcactaacaaaatatcgcttgtcagttatattgtatggcaggaaagatatgcgactgatattacagatccccaaagtggagagtttatgaccattaaaaataagatgttgctgggtgcgcttttgctggttaccagtgccgcctgggccgcaccagccaccgcgggtagcaccaataccagcggaatttctaagtatgagttaagtagtttcattgctgactttaagcatttcaaaccaggggacaccgtaccagaaatgtaccgtaccgatgagtacaacattaagcagtggcagttgcgtaacctgcccgcgcctgatgccgggacgcactggacctatatgggtggcgcgtacgtgttgatcagcgacaccgacggtaaaatcattaaagcctacgacggtgagattttttatcatcgctaaaaaaagccccctcatcatgagggggaaatgcagacaccttgttattttttattattagccacttgctcgtcttgcttgttattagtcgtatttcacgttgattaatgcggttgcctccagtgcgccagatttaactttgtttgtatcgtagacgtagtaactggctgttatcggaatactaaccgttgtatctgtaagtttactcttcgccgcaacttcctttaaatttgtatatcctttactgctgttagtgatatttaaaagtgtgactgggctaccattactttcaagaataaatcctacgccattatcttccgcacctttcagtattgtgttgctgttggttaacaagtcagaactacttaaatacacctgcattttccgacttgtttgattttgttgacctaataaatttttacaacgcagaataatatccccttgtttactatttattgttgctttgttacctgtggctggtaattgactaacgggaatactgtctaaagtaattaataaatcgtccggtttgcaggttgtggttatcgggttgtaactcaatgtcagattaaaggaatagacacctgcattttgtgccaatgcatttctgtagctatttacacatgcatcccaactcttgccacctaataaacacagtagaaattgtactgcggcactcccgcgtgtgctactactagcactggataatgtcgcaacaccattaatcatcacactaccgccgccccccgcagaaacattcacttttgcattactggccgcaggtgtcaccgtaacactataaccactggtgaaactggtctgattattactcaacgtgatgttgtttttattggtccattcaaaatgtaaatttaattttatggtatcgttataaagtccaacaataatatcgctcgggctcataggggtgatagtatttgtacttacgcaactgctatcattaaaattatgctcatatgtcgccatttgtgtttgagtaagtgcaaaatccccctgaacaaccaagttgtgctgaacagataactcactataacatgccgcatagctcacaggcataaccatcatcattaatataaatagcattatgcgaatttccatagaaccacctgactattactggcaaatataatttctactttcatcaatctctttaccgaaggtgattgtgcaactaagtccttgttgcttatcaattgccacattaacgcttggcggtacttcattggtgcgaataaataactgacttccctggccgacaacgccaatattatgaccatggatatcattgacttcataaccaaacgttaaactttgcccatctgctcttaacgcttttataaaccatggcttgcgctgatcggtatcaaaattaaccagtacaaccgcgccgcgataaggggcggcaattttccggttgccacgtaattctgcttcgctatcgctttggctcacatccagcatcaggtgattttcccgataaggtgtcattccgtcgtatatcaccactccattacggtttgttgtgcgatatttttgcccattgacataagcatctttaattcctggcgcattcatcacagcaaacgtttcggaaagacggttcgccagattaacgccaccgctccaggcgacaatgcccccactaacactggctccagcctgtcgataagtactgctctgactataactgccattcactgtcgcaaccggcgcgttccaggtcaaattcgccccagctgtcgtttcatttccctgatgttgatgactcaggttgacaccataattgaactgatcccgactccctactgttccacttaatcccgtattattactggcaaacccctgatcatcaaacgtcgtactgttagacatatatatttgccgacgaggcgtgctaacgtcatcaccccaatcaaagggaatgcttataaaaatattaaaacgtttctcttcatgatgattctcgtcataagcctggcttgccgcgagggtatagcttatccgtcgcaggttgttggaataactcaactgataatccttactactgccgctacgcccccagtaatctcgccataacgtacttaaactcacagacccccaaccttctggcaaactctggctcatattggcggaaaagctatttttgcggccaaaatcgttctggtaataatcggcaatgtcatagacatcgttttcatcacggcgataattatctttattgtttgcccaaacgtgatcgttaaatgtccggtaatcacggctgctataacgccaggccgccagaccaaaacgcgtgctcgtttggctcacaaacttgttgtaggcaatttgataactttgcccgtcaaacacatcgccgttgtcttgtttactatggctcttagtggcatcgacggaaatggcaccaatgcgtgtattccagccagcccccaaagtaaacgcgtaataattattcgcgaccatgctgccaccatacagcgtcaataaattattaaaaccatactgataacccgcctggacaaaatcactttgtttgctcgccccttcaatatggctacgacccgccgctaaatcatatttgctcacgccgggttgcagcatatttggcaccgctgcataaggcaccagataggtggttacgctgccgtccgcctctttcacgctgacatcaagatctgctccaccaccggccaactgcaaatctgtaatcgcgaacgggccaggaggaacctctttctgataaaccacaaaaccattctgttcaatagttaccagcgcgttactctgagcaatcccctgcacccgtggcgtaaaattttgtttgctgttaggcaacatctgcatatcacgaaacaaccgcacacctctgaagcgaacagaatcaaaaatatcgctacttgtgtacatatcacccacgcgaagcgtgccgagaagttgggcaaatccacgttccagatacagggtattgcttttccacacccctggattgttatttgttttactgaaactggcatcagaatgcagttgccaccccagtaaatttaacccgctgttaaaacgtacatatgtactcttgttattaccgctcgctttatagtcgctgtaatactgactcagataataagaggtataaaacgcattaataccccgctcccagttttccggtggaacatagccactttccagttcttccacccaggcctgcgggacactgaaatcgagacgaaaaaccccgatatcccaggtatagctcccaccctgaacaagttgctcaaatgttaaacattgcttaccgctggcgaagttatcgctattaatgcctaaccgcttgataacttctctacttaaacatgtttcttgcgggttgtctttaacaataatctcatatttcccgcgccattgcttattgacataaatatcgatgtcatactgccccggtaagggttgattatcatcaagacgaatatttgcaacctgctggtctttcattccacctatcataaaatgggtatcaaaggtttcttcagctgcataagcttcaatgccgagcaataacgctacgattgcacttgcaagtggggtcattctcaacataggcagctcctgcaattaaattttgtcactaatatagttgccatggtcatcgataatggtcagatgccagttatttgcattattacttttgacattaacactctgactttctaagggggcaatcataatagtttcataattgactttgacattattagctttgacatcgctaatcgtcacccaattagcactgtcattttttatcaccaaaccattgccactgcgatttaccagcaattttttaaatgtcgctttatttaccggagcaatacccgctggccggtaaaacaacttaattctgttttgcatcgcaaacttcagtgcattcttaccttcttgctctggactatttggtggaatatccagaacattcagataaaaaatgctttctttattagtgggcagtttattcggcataattttgatttttacttgctgcccggaatttgcccctatttttgccactggtggcgttaacatgaaaggaacctgaattttttctggtggtaaactcgtatcgccatcatcaatccacgcctgcagcaggctagaacggtttccctggttcatcaactgcaccatcacttctttattttctgccgggtaaataatgcgcgtcccgtagataacaattccggcatgtgcaggaaggaccatagaaaaaatgagtaaagataataatcctttcattttaatgcctcttaaattaaaaggccgccatgggatagcggccatgtttattacctggagaaacttacaattttatttattaatcctgcgccacacgcataaccagagaagataacacatcaccactttgcacactgttatctgtcagtttcaggtattttgctttaaacggaatagcatattgaccttccgctgttttataactctcaatgttaaaaggtgcagaaacatccaggacatcgctgttatcacctaaatagagatagtaacccacggtatcgttgctactggctatcgccttatcgttaccggttattttatcgttggtaatcaagctgagttttacaccagcaacttctttcgggcagctaatttttaacatgctgctggttacaccgactgcatcatcataggtagaatatttagctttaccttcaaagacactggttggtacagtcggcatattaatacttacactatcaccacccgcttcgaatttacacggagattctgcaatattccccttaatagttaatgttccggtatcaacgtctgcagcaaatactccagcgctcataaaaaaagaagaaaagacagcggcagcaataatactacgtttcataatatgttccttaataaaatttatttttggttgttaagagtctgtatctcttggaaacaaatttctcacatcaaaaaagttgccgcaatgtaaacacattgttttattgatttaaaacaaattaaccattgcaatataaatacaaaaaatatttaagagtattaactatttatcgcatctatcaattaatgtagatttatgtaaatggtattgttgatatcaataaaaaagccgaaatcatttatataaatgatttcggctttctaaatgcaattaaaatcaggttgccaaattaatcgtagcgatttaacacgattcgacgtttgctatcgctacctgcaacaaccacttctgtcgttacacctttgacggggctagaaaacagatgacgggtgtcaacattatacgttaactgaccacaatgctgttgaggttgaccattaaccatagccatactgcatgttgggggactgatcctgccattaatcgctaatgtggcagtctcactagagaatgcgggagaagccaatccataggcaagaaaaataattccactcagccaatacttattcattgaacgttatccctgtagtaaaggttatgcctggatagaatgagtgcataacaaactatagctgtacatccactacacagccacgaaggatgataatgaagcattgcctgtatgatcaatcgactttgtagagtttcggacgaaggtccgcagaatattcgcagtattaaataagtgttcattaatgcggcaaaaactaatacaccgcatcaatgtaacatctctgcggtgtatgaagaataaccagaatggttaataggcgttagaccgcgcggaaggaaatctcgcctggaatgacttcaccctgccagtagagctgagctgcaacgcggtcagccagctggcggtagatagcggtaaattcgctctccggacggctgataaccgttggcgtacctttatcgagatcctcacgtaaggagatgtgtaacggcatctgccccagcagctgtgtatggtatttttcagccagtttctctgcaccaccggtaccgaaaatcggttcatggtgaccacagttactgcaaatatgcacactcatgttctcgacaataccgagcaccggaacctcgactttctcgaacatcacaatgccttttttcgcatcgatcagcgcgatgtcctgcggggtggtgaccacgactgcaccggttactggaatgttttgcgccagcgtcaattgaatgtcaccggtgcctggcggcatatcaagcaccagatagtcgagatccggccacaaggtttcctgcaacatctgcattaacgccttgctcgccatcggtccacgccacaccatcgcattgtcgtcagtgaccagataaccaatactattggttgccaggccatgagacataatcggtgccatatgggtaccgtccgggctagttggacgctgattttctgcgcccaacattgttgggatacttgggccgtagatatcggcgtccagaatgccgactttcgccccttctgccgccagcgccagtgccaggtttaccgccgtggagcttttacccacgccgcctttaccggaactcaccgcgataatgttcttcacaccgttaattcccggctgattcttcacgcgtttcagagtggctatgttatggctcagtttccagtcgatagctttcgccccggtgatgcgcagcagttcggcgctacattgctcttttaactcttcgaacgcgctatgccagacaaacggcataaccagttccacatgcaacgtgtcgtccatccaggcgacatggtgcaacgctttcagcgtggtgaggttatgcttcagggttgggtgctgaaaattggccagtgtcccggcgaccattgcgcgcaaggcttctggacttttggcctgggattgttcgttcatcccgactccttttttgtatagataaaccatcagctgatagtttacctgaagaatatagagaagtacttacttaacattttcccatttggtactatctaaccccttttcactattaagaagtaatgcctactatgactcaagtcgcgaagaaaattctggtgacgtgcgcactgccgtacgctaacggcagtatccacctcggccatatgctggagcacatccaggctgatgtctgggtccgttaccagcgaatgcgcggccacgaggtcaacttcatctgcgccgacgatgcccacggtacaccgatcatgctgaaagctcagcagcttggtatcaccccggagcagatgattggcgaaatgagtcaggagcatcagactgatttcgcaggctttaacatcagctatgacaactatcacagcacgcacagcgaagagaaccgccagttgagtgaacttatctactctcgcctgaaagaaaacggttttattaaaaaccgcaccatctctcagctgtacgatccggaaaaaggcatgttcctgccggaccgttttgtgaaaggcacctgcccgaaatgtaaatccccggatcaatacggcgataactgcgaagtctgcggcgcgacctacagcccgactgaactgatcgagccgaaaagcgtggtttctggcgctacgccggtaatgcgtgattctgaacacttcttctttgatctgccctctttcagcgaaatgttgcaggcatggacccgcagcggtgcgttgcaggagcaggtggcaaataaaatgcaggagtggtttgaatctggcctgcaacagtgggatatctcccgcgacgccccttacttcggttttgaaattccgaacgcgccgggcaaatatttctacgtctggctggacgcaccgattggctacatgggttctttcaagaatctgtgcgacaagcgcggcgacagcgtaagcttcgatgaatactggaagaaagactccaccgccgagctgtaccacttcatcggtaaagatattgtttacttccacagcctgttctggcctgccatgctggaaggcagcaacttccgcaagccgtccaacctgtttgttcatggctatgtgacggtgaacggcgcaaagatgtccaagtctcgcggcacctttattaaagccagcacctggctgaatcattttgacgcagacagcctgcgttactactacactgcgaaactctctagccgcattgatgatatcgatctcaacctggaagatttcgttcagcgtgtgaatgccgatatcgttaacaaagtggttaacctggcctcccgtaatgcgggctttatcaacaagcgttttgacggcgtgctggcaagcgaactggctgacccgcagttgtacaaaaccttcactgatgccgctgaagtgattggtgaagcgtgggaaagccgtgaatttggtaaagccgtgcgcgaaatcatggcgctggctgatctggctaaccgctatgtcgatgaacaggctccgtgggtggtggcgaaacaggaaggccgcgatgccgacctgcaggcaatttgcagtatgggcatcaacctgttccgcgtgctgatgacttacctgaagccggtactgccgaaactgaccgagcgtgcagaagcattcctcaatacggaactgacctgggatggtatccagcaaccgctgctgggccacaaagtgaatccgttcaaggcgctgtataaccgcatcgatatgaggcaggttgaagcactggtggaagcctctaaagaagaagtaaaagccgctgccgcgccggtaactggcccgctggcagatgatccgattcaggaaaccatcacctttgacgacttcgctaaagttgacctgcgcgtggcgctgattgaaaacgcagagtttgttgaaggttctgacaaactgctgcgcctgacgctggatctcggcggtgaaaaacgcaatgtcttctccggtattcgttctgcttacccggatccgcaggcactgattggtcgtcacaccattatggtggctaacctggcaccacgtaaaatgcgcttcggtatctctgaaggcatggtgatggctgccggtcctggcgggaaagatattttcctgctaagcccggatgccggtgctaaaccgggtcatcaggtgaaataatcccccttcaaggcgctgcatcgacagcgccttttctttataaattcctaaagttgttttcttgcgattttgtctctctctaacccgcataaatactggtagcatctgcattcaactggataaaattacagggatgcagaatgagacactttatctatcaggacgaaaaatcacataaattcagggcagttgagcaacagggaaacgagttgcatatcagttggggaaaagttggcaccaaagggcaaagccagataaaaagtttttcagatgctgcggcagcggcaaaagcggagcttaagctgattgcggagaaggtgaagaaggggtatgtggagcaagcgaaggataattctttgcaaccttcccaaacggtaacgggctctctcaaggtagcggacttatccaccattattcaggaacaaccctctttcgtagcagaaacccgtgcgcctgacaaaaatacagatgctgttttaccgtggctggcgaaagatattgctgtcgtttttccgcccgaagttgtacacaccacgttaagtcatcgccgctttcccggagttcctgttcagcaagcagacaaattgccccaattacgtcgcttagcctgtagtgtgtcgcaacgggataataaaacagccacatttgacttcagcgcctgttctttagaatggcaaaacaccgtcgcccaggcgatcagtcagatcgacggcctgaaaacaacacagttaccatcaccagtaatggctgtactcacggcacttgaaatgaaatgcacaagatataaagtgcgtgaggatgttatggatcagatcgtccaggaaggcggtctggaatatgctactgatgtaataatacaccttcaacagattgatattgaatgggattatgcgaataatgtcattattattctgccgtctggcattgcacctagctacttggagcaatattccagatttgaatgacgcctacgtaaacatttatcactgacggaagagtctctctggcaaaaatgtgcacaaaaacttattgccgcaattccacatattccagaatggcggcaaccattaattgctttgttattacccgaaaaaccagaaattgcacatgaaattgcccagcgtctactggggcaaaaaaaattaccctcgcttgagtggttaaaaatagtggcgactgatgagcacattcttgcctcattagaaaaatatcacgaaccatatgccatttttgatgattactattgtggtgcgatatggtcagccaccgtattacaggagcaaggtgttgcagccctgccccgatttgctccctatgccgcaagtgactactgcgccgatgtgttgcgtcatatcaatcatccgttcgcattgacactgcttatacgtgtagccgggcaaactaaacgctgtcacgatcggatgacgaaagccattgctgcgttcccacatgcagcaatggcggcactgacggaacttcttgggcaaaaagaagagaacagttggcgcattatgctaatgacaatgcttatctcacaaccagcactggcagaacaggtcattccctggctctcgacacccgcagttgccgtactgaaatcatgccagcaacaactgacacagccctcaaaccatgccagcgccgatctactgccagccgtagtagtctcccctccctggctttcgaaaaagaaaaaatcgccgattccggtgctggatttagcgccattaggcattgagccaatctgttatctgacagaagaaatcagtaatcaacttttggcgaaatatatctggtattcaaaacacatcacggttagccatgaagaaagtactaccaacctgttggcaaggatgggttttcaacgacggatcgctggtacatatattaaagctcccgaagcggtagttgaggcatggctaaatgaagattattcaaccttactaagtgaatttaaggtgtttcattcacctaccgggcattattggcagttggggattttgacaacattgccgctggagaaagcagtaaaagcatggaatgcccttaccctatctccacataccgataccgaatactccatgttacattttggactcaaagggttacctgggttagtaaactcacttgcacgctatccacaagaagccttgcccatcacgaattacttcgcagcgagtgagctggctcctgccgtcgcccgtgccttcaacaaactgaaaacgctacgcgaaaacgcccgtagctggctgttgaaatacccggaacatgcccttaccggcctgctgcctgcggcgctcggcaaagccggtgaagcacaggataacgcccgcgctgccttgcgtatgcttaccgaaaacggtcatcagccattactgcaagaaatcgcccgacgttataaccagccggaagtaaccgatgcggtgaacgctctgcttgcgctcgatcccttagataatcacccgacaaaaatccccactcttccggccttttatcagccatcgctctggacgcgcccggtattaaaagcaaatgcccaatcactgccagatagcgccctcctccaccttcggtgaaatgctccgcttccctcaggaagaggctctgtatccgggattattgcaggtgaaagacgtctgttccgccgactcactggcgggatttgcctgggatctgtttaccgcctggcagaccgctggcgcgccgtcgaaagagagttgggcgttcactgcgttaggcgttctcggtaacgatgacaccgcccgcaaactgacgccattaatacgcgcctggcctggtgaatcccagcataaacgcgccaccgttgggttggatattctcgctgctatcggtagtgatatcgcccttatgcagcttaacggcatcgcccagaaactgaaattcaaagcattacaggagcgggcaaaagaaaaaattgccgacattgccgagagccgcgaactcacggtggcggagcttgaagatcgggttagcaccggatctcggtctggatgataacggttcgctgctgctggattttggcccacggcagttcaccgtcagctttgatgaaaccttaaaaccgtttgtgcgtgatgtttccggcagccgcctgaaagacctgcccaaaccgaacaaaagcgatgatgaaacgcgggcgaacgatgcggttaaccgctacaaattgctgaaaaaagatgcgcgtaccatcgccgcccagcaggtagcaaggctggaatccgccatgtgcctgcgccgccgctggtcgctggaaaacttccagctcttcctggttgagcatccgctggttcgtcacttaacccgccgtctgatttggggcgtttatagcgccgaaaaccagctactggcttgctttcgcgtagcagaagataacagctccagcaccgctgacgatgatcttttcaccctgccggaaggcgatatctctatcggcactcctcacgttctggaaatatcaccaacggatgctgccgcctttggtcagctttttgccgactacgaactgctaccaccgttccgccagctcgaccgtaacagctacgccctgacagaagccgagcgcaatgccagtgaactgacccgctgggcaggcagaaaatgcccgagtggtcgggtcatggggctggcgaataaaggctggataaagggcgaaccacaggatggaggctggatcggatggatgatcaaacctttgggtcgctggtcgttaatcatggaaatcgatgaaggctttgcggtaggcatgtcgccagccgaactcagcgctgagcagctcttaagcaagctgtggctatgggaaggcaaagcagaaagatatggctgggggagtaattcaacacaggaagcgcagttctccgtaatcgatgccatcaccgccagcgagctaattaacgatattgaagccctgtttgaataaggaaagagcatggacaaggaattaccgtggctggcggataacgcccaactggaactgaaatataaaaaaggcaaaacgccgctcagtcatcgtcgctggccgggcgaaccagtgtccgttatcactggaagtctcatccagacattgggtgatgaattgctacaaaaagctgagaagaaaaaaaacattgtctggcgttatgagaattttagtctggagtggcagtccgccatcacgcaggccatcaacttgatcggcgaacacaaacccagtatcccggcccggacaatggcggcgctagcctgtatcgcgcaaaatgacagccaacagttgctcgacgaaatcgtccaacaagaggggctggaatatgcgactgaggtggtgattgcacgccagtttattgcgcggtgttatgagagtgatcctctggtagtgacattgcagtatcaggacgaggattatggctatggttatcgcagtgaaacctataacgaattcgatctccgactgcgtaagcatctctctctggcagaggaaagctgctggcagcgttgcgccgacaaactcattgccgcactaccaggaataaacaaagttcgccgcccttttattgcgctgatcctcccggaaaaaccagaaatagccaatgagttggtaggccttgaatgcccgcgaactcattttcattctaaggagtggttaaaagttgttgctaatgaccccacagcggtgagaaaactcgaacactactggagccaggatatatttagcgatcgagaagccagctacatgagccatgaaaaccacttcggctacgcggcctgcgccgcccttttgcgcgaacaaggactggcagccattccgcgcctcgcgatgtatgcccataaagaagattgcggcagtctgctggtacaaattaaccatccgcaagtcatccgcaccttgctactggtggctgataaaaacaaacccagcctgcaacgtgtagctaaataccataaaaacttcccccatgcgacgctcgccgcactggcagaactgctggcgttaacagaaccaccagcccgccctggttatccaatcatcgaagacaaaaagctgcctgcacagcaaaaagcacgcgatgaatactggcgtacgctgttacaaacgctgatggcaagccagccacaactggcagcagaagtgatgccgtggttaagtactcaaccccagagtgtgctgaagagttatttaagcgcaccgcccaaaccggttattgatggcaccgataacagcaatctgccagaaatcctcgttagtccaccgtggcgtagtaagaaaaaaatgacagctccacgtcttgatttggcaccgctcgaattaactccgcaagtttactggcaaccaggcgaacaagagaggcttgccgccactgagcctgcccgttatttcagcacggaatctcttgcgcaacgcatggaacaaaaaagtggacgagttgtattacaggaactgggttttggggatgatgtatggctgtttctgaattatatactccccggaaaactggatgctgcacgcaatagtctctttgttcagtggcattactaccaggggcgggttgaagagatcctgaatggctggaactccccggaagcacaattagcagaacaggcgctccgcagcggtcacatagaagcgttaattaacatatgggaaaatgacaactacagtcattatcgtccggaaaagagtgtctggaacctgtatttattggcacagttgccgcgtgagatggctttgaccttctggctgcgtatcaatgagaaaaagcatctgttcgcgggtgaggactattttctcagtatcctcggattggatgcgctaccaggtctgctgttggcttttagtcatcgtccaaaagaaacatttccgttaattttaaattttggcgcaacagaactggcgctgcctgttgcccacgtctggcgacgtttcgcggcgcagcgtgatctggctcgccagtggattttacaatggccggaacatacggctagtgcacttatccctcttgtctttaccaaacccagcgataatagcgaagccgcattacttgccctgcgtttactgtacgaacagggacatggcgaattgctacaaaccgtggcaaaccgctggcagcgtacagatgtatggtctgccctggagcagttgcttaaacagggtccaatggacatttacccggcacgcattccaaaagcccctgatttctggcatccgcaaatgtggtccaggccgcgccttatcactaataatcaaactgttaccaatgacgctctggaaattatcggcgaaatgctgcgctttacccaggggggacgtttttatagcgggctggaacaactgaaaacgttctgccagccacaaacgctggcagcttttgcctgggatctcttcactgcgtggcaacaagctggtgcccccgcaaaagacaactgggcatttctggcgttaagtctctttggtgacgaaagcacggcacgggatctgacgacacagatcctcgcctggccacaagaaggcaaatctgcccgtgctgtcagcggcctgaacatccttaccctgatgaataatgatatggcgctgatacagctgcatcatataagccaacgggctaaatcccgccccttacgtgataacgcggcggaatttcttcaggtggtcgcagaaaatcgcgggctaagccaggaagagctagcggacagattagtcccaaccctgggccttgatgatccgcaggcgttgagttttgattttggtccccggcagtttaccgttcgcttcgatgaaaatctcaacccggttatctttgatcagcaaaacgttcgccagaaaagcgttccccgtttgcgcgccgatgacgatcaactgaaagcgcccgaggcactggcccgactaaaagggctaaaaaaagatgctactcaggtgagcaaaaacctgctcccgcgtcttgaaacggccctacgtaccacccgacgctggagcctggcagattttcattctctgtttgttaatcatccctttacccgtctggttacccagcgattaatatggggggtttatccggcaaatgaaccgcgttgtttactcaaagcctttcgtgtggccgcagagggggagttctgcaatgcgcaagatgagccaattgacctgcctgcggacgctctgattggcattgcccacccgttagaaatgacagcagaaatgcgcagtgaatttgcacagctttttgccgattacgaaattatgccgccttttcgccagttgagccgccgcacggtgctgctcacacctgacgagagtaccagtaacagcctgactcgctgggaaggtaaatccgctaccgttgggcaacttatgggaatgcgatacaaaggctgggagagtggctatgaggacgcatttgtctataacctgggtgagtaccggctggtccttaagtttagtcccggttttaaccactacaatgttgatagcaaagcgctaatgagcttccgttctcttcgagtgtaccgtgacaataaatccgtcacttttgccgaacttgatgtgtttgatttgagtgaggcgttaagcgcacctgacgtcattttccattaaaacacagcgggcagtgatgcaactgcccgttatcaacacgacttaccagcggggaaagcgatgatcgtgcaaaaagagctggttgctatttacgattatgaggtccctgtacctgaagatccgttttccttcagacttgagatccataaatgctctgaattatttacaggttccgtctatcgactggagcgattccggctacgtccaacatttcatcaacgtgatcgagaagatgctgacccgctaataaatgatgcgttgatttatataagagatgagtgtattgatgagcggaaattacgaggtgaaagtcctgaaactgtaatagcaatttttaatcgtgaactacagaatatattcaaccaagaaatagaataatatactctaaataattcaaattggtccgatccggcgcaacgtcccaatggcctggattataaatctcattatcttaattgcaacggggtccagccgtggttataattcgttcgttggaacacgatgttgcacaggctgtggtgttaggcctgaaaatagtaaataaaagaacctgcctcaccagcaggtttttttatttactgtgatctgctttccagatatttttcgctcaaacaactaatgcgccaaacatttattgcgcgtaaaatatcgtttatttcattaatacatttcagggatgaatatatgagtccgcagaataatcatctgcagcgtccgcctgctgctgtgttatacgccgatgaactggcaaaattaaaacaaaatgataacgcaccttgcccgcccggttggcagttaagtttgcctgcggcccgtgcttttatccttggcgacgaagcgcaaaatatcagccgtaaagtggtgattagcccctccgctgtcgaacgtatgttagtcactcttgctaccggccgcggtttgatgttggtgggggaaccgggtaccgcaaaatctcttctttctgaattactggcaaccgctattagcggcgatgccgggttaaccatccagggcggggcatctaccaccgaagatcaaatcaagtatggctggaactacgccctgcttatcaatcatggtccgagtacggaagcgctggtccctgccccgctttatcagggaatgcgcgacggcaaaatcgtccgtttcgaagagataacgcgtacaccgctggaagtgcaggactgtctgttaggtatgctttctgacagggtgatgacggggccggaactcactggtgaagccagtcagctctatgcgcgagaaggctttaatattattgccactgccaatacccgcgatcgcggcgtcaatgaaatgagtgctgcgctaaagcgtcgcttcgattttgaaacggtttttccgattatggatttcgcccaggagttggaactggtcgccagtgctagcgcgcgtttgctggcccatagcggtattccgcataaagtgcctgacgcggtactggaattactggtccgcaccttccgcgatctgcgtgccaacggcgaaaagaaaacgagtatggatacactgacagcgattatgtccaccgctgaagccgtgaacgtggcccatgctgtgggcgtccgcgcctggtttttagcgaatcgcgcgggggagcctgccgacctggtggaatgtattgccggaaccatcgtcaaagataacgaagaagatcgcgcgcgtctgcgccgttacttcgaacagcgtgtcgccacacataaagaagctcactggcaggcttattatcaagcccgccaccgcctgccgtgaggaaagatgcatgagcgagccgttaattgtcggcatccggcatcatagtccggcctgcgcccggctggtgaaaagcttaatcgaaagccagcggccacgatacgtgttgattgaaggcccggctgattttaatgaccgggtagacgaactgtttttagcccaccagcttccggtagctatttacagttattgccagtatcaggacggtgcagcccccgggcgtggtgcctggacgccatttgctgaatttagcccggagtggcaggcgctacaagccgcacgtcgcattcaggcacaaacttacttcatcgatttgccttgctgggcgcagagtgaagaagaggacgatagccctgatacgcaagatgaaagccaggccttactgctgcgtgccacccgcatggataacagcgataccctgtgggatcacttgttcgaagatgaaagccagcaaactgcattaccctctgcgctggcgcactattttgcccaactgcggggcgacgcctccggcgatgcgctcaatcgtcagcgcgaagcctttatggcccgctggattggatgggcgatgcagcaaaataatggcgacgtgttagttgtctgcggtggctggcacgctccggcactggcaaagatgtggcgcgaatgccctcagaaaattaacaagccagaattgcccagcctggcagatgccgttacaggttgttatctcacaccctacagtgaaaagcgccttgatgtgctggcaggataccttagtggaatgcctgccccggtatggcaaaactggtgctggcagtggggcttgcagaaggccggtgaacaactgctaaaaactatccttacccgtttgcgccagcacaaattgcccgcttctaccgcggatatggctgccgctcatctgcatgcgatggcgctggcacagttgcgcggtcatacactaccgttacgcactgactggctggatgccatagcaggcagcctgattaaagaagccctgaacgcgccgttgccgtggagctatcgcggcgttattcatcccgataccgatccgattctgctaacgttgatagacacattagcgggtgacggattcggtaaacttgccccttctacgccacaaccgcctctgccaaaagatgtcacctgcgaactggaacgtaccgcaatctcccttccggcggagcttaccttaaatcgctttacccccgatgggctggcgcaaagtcaggtgttacatcggctggcaatactggagatccctgggattgtacgccagcagggaagtacactgacacttgcaggcaacggtgaagaacgctggaaattaacccgcccgcttagccagcatgcggcattgattgaggccgcctgttttggtgccacactccaggaagccgcacgcaataaattagaagccgatatgctggacgcgggcggaatcggcagtatcaccacatgtcttagccaggcggcgttagcgggtctggcgtccttcagtcaacaattactggagcaactcacactattaatcgcccaggaaaatcaatttgccgaaatgggccaggcgctggaagtgctttatgccttatggcggctggatgaaattagcggtatgcaaggcgcgcagatattacaaacgacgttatgcgcgactatcgatcgcacgctgtggctgtgtgaatctaacggcagaccggatgaaaaggagtttcacgctcacctgcatagctggcaagcgctttgccatattctgcgcgatctacatagcggcgttaatttacccggcgtttctctttctgcggcggtagccttactggagcgacgcagtcaggcaattcatgccccggcgctggatcgcggcgcggctcttggcgcactaatgcgtctggaacatcccaacgccagtgccgaagcggcgctgacgatgctggcgcagttatccccggcacaatctggtgaggcgctgcacggtttgctggcgctggcccgccatcaactggcctgtcagccggcatttatcgccggtttcagcagtcatttaaatcaactgagtgaagccgattttattaacgccctgcccgatttacgcgcggcgatggcctggctaccaccacgagaacgcgggacgctggcgcatcaggtgcttgagcattatcaactggcgcaacttcccgttagcgcgctgcaaatgccgttgcattgtccaccacaggccattgcacatcatcaacaactcgaacagcaggcactggcaagcctgcaaaactggggagttttccatgtctgaactgaacgatcttctgaccacccgtgagctacaacgctggcgattaattcttggcgaagcggcagaaacgacgctttgtgggctggatgacaacgcccggcagatagaccacgcgctggagtggctgtatgggcgcgatcctgaacggctccagcgtggtgaacgttccggtggattaggtggcagtaatctcaccacccctgagtggatcaacagtattcacacgctgtttccgcagcaggtgattgagcggctggaaagcgatgccgtgctgcgctacggcattgaagatgtggtgacgaatctcgacgtgctggaacgtatgcagccttctgaaagcctgctacgcgctgttttgcacaccaaacatctgatgaaccccgaagtactggctgccgcccgccggatagtgtgccaggttgttgaagaaattatggctcgactggcaaaggaagttcgtcaggctttttctggtgtccgcgatcgccgtcgccgtagttttattccactggcgcgaaactttgatttcaaaagtactctgcgcgccaacctgcaacactggcacccgcaacacggcaagttgtatatcgaatccccccgctttaacagccgcattaaacgccaaagcgaacaatggcaactggtcttactggttgatcaaagcggaagcatggtcgatagcgtgatccactctgcggtgatggcggcctgtttgtggcagttacccggcattcgtacccatctggtggcgtttgacacaagcgtcgttgatctcacggcagacgttgccgatccggtagagttattaatgaaagtacagttgggcggcgggaccaatatcgccagtgccgtggagtatggtcggcaacttattgaacaaccagcgaaaagcgtcattatcctcgtgagcgatttttacgaagggggtagtagtagtttactgacgcatcaggtgaaaaagtgtgttcagagcggcatcaaagtgctgggactggcagcgctcgatagcaccgcaacaccttgctatgaccgcgatacggcccaggcgctggttaatgtcggcgcacaaatagccgccatgacgccgggcgagctggcaagttggcttgcggagaatcttcagagttgacataacttgcggagaatcttcagtcatgaatagtctacgtccggaattattagaactgacaccgcaggccctgacggcgttaagcaatgccggttttgttaagcgcagtcttaaggaactggaaaatggcaacgtcccggagatcagccatgagaacgacgctttaatcgccaccttcagtgacggtgtccgtacccagctggcgaacggccaggcactgaaagaggctcagtgcagttgcggggccaacggtatgtgccgtcatcgcgtgatgctggtgttaagttatcaacgactttgtgccaccactcagtctacggaaaaagaagaagagtgggatccggcaatctggctggaagaactggctacccttcccgatgctacccgcaaacgcgcacaggcgctggtcgctaaaggcatcaccattgagttgttctgtgcgccgggtgaaattccctctgcccgcttaccgatgagcgatgtgcgtttttattcccgcagcagtattcgtttcgcccgttgtgattgtattgaaggcacactttgcgaacatgtcgtactggcggtacaggccttcgtcgaggccaaagcgcagcaagcagaatttaaccatttaatctggcagatgcgcagcgaacacgtcacaagttctgacgatccgtttgccagcgaagaaggcaacgcgtgtcgtcaatatgttcagcaattaagccagacattatggcttggcggcatcagccagccgctcatccattacgaggcagcattcaaccgcgcattgcaggcggcagagacctgcaactggcgctgggtgagtgaaagcctacggcaactgcgcgccagcgttgatgccttccacgcccgcgccagccactataatgccggagaatgcttacatcagcttgcggcattaaacagtcgattaaattgcgcacaagagatggcccggcgcgacagtattggtgaagttcctcctgtgccgtggcgcacggtcgttggctctggcattgccggagaagcaaagcttgatcatctgcggctggtgtctttaggtatgcgttgctggcaggatattgagcattatggtttacgcatctggtttaccgatcccgacaccggcagtattttgcaccttagccgcagttggccgcgaagtgaacaggaaaacagtccggcagctacgcgtcggctgtttagttttcaggctggcgcactggcgggcgggcaaattgttagtcaagcagcaaaacgcagtgccgatggcgagctgctgttagctacccgcaaccgcttaagcagcgttgtgccgctgagccctgatgcctggcaaatgttgagcgcgccgttacgccagccgggcattgtggctttgcgggaatatttacgccagcgtccccccgcctgcatacggcctcttaatcaggtcgataacttatttattctgccggtcgctgagtgtattagcctcggttgggacagcagccgccagacgctggatgcgcaggtcattagcggcgaaggggaagataatgtgctgacgttaagtttaccagccagtgccagcgcaccttatgccgttgaacgcatggcggcgcttttgcaacaaacagacgaccccgtgtgtctggtttctggctttgtcagttttgttgaagggcaattgacactggaaccacgggtgatgatgacaaaaacccgtgcctgggcgctggacgcagaaactacgcctgtggcaccgctaccttctgccagcgttttgcctgtgccgtctactgctcatcagttgctgatacgctgccaggcgttacttattcaactgctccataacggctggcgctatcaggaacagagtgctattggtcaggcataattgctggcgaatgacctcaccgcggtgggtttttatcggctggcacatgtgttgggacaatttcgtaatacagaaagcgaggcacgggtagaagcaatgaataacggtgttttgctttgcgaacaattattccccatgcttcagcaacaaggatgaaatagtgctttttactaagagttctactccagttccggactgctcacgccacggtattaggcatatcctatatagcccctggtgagagtcaccagttccttgattaaataaaatggagttttacatgaaggctttcaataagctgttttccctcgttgttgcatctgttctggttttctctcttgctggctgcggtgacaaagaagaaagcaagaaattcagcgccaatctgaacggcactgaaattgccattacctatgtctacaaaggtgacaaggtgcttaagcaatcttctgaaaccaaaattcaatttgcctccattggtgcaaccaccaaagaagatgctgccaagacacttgagccgttaagcgccaaatacaaaaacatcgcgggtgttgaagaaaaattaacctataccgatacctacgcgcaggaaaacgtgactatcgatatggaaaaagtggattttaaagccctgcagggtattagtggaatcaacgtttctgctgaagatgccaaaaaaggtatcactatggcgcaaatggaactggtgatgaaagccgctggttttaaagaagtgaaataatcggttggcggtcatgctctaaacatgaccgccaattttttagccttttttcacatgctggcgcgctgccagtccacgcagaaaataacgtaaaaattgatcgccgcattcgcggaagtttttatgatccggtgcgcgcatcatcgctgtaatttccggcatgctaacgcggaactgctgttcggtgaggatagccagaatgtcatcggttttcaggctaaacgcgatgcgtaattttttcagcacgatgttgttattaatgcgacgttccggctccagtgccggagcagactcatccttgccgcgtttttcataaatcaggccattgaggaaactgctcaaaacaatgtccggacaacgctgaaaaccctcttcgtcttctttacgtagccagacggcgatctgttccgcggtggcttcgacattacccagcgccagaatacgcaccaggtcattattattggctttcaaaatgtagcgcacgctgcgcagaatatcgttacttagcatgaggccttcaggtgttgatgaggcaaaaagccattttagcagtcttttacaggccaatcgcctcttttaagcttttcagataacggcggctgaccggcacggttaagccattacgcaaaatcaactcggcctggccgttatcttccagacgaatctcctgtaaatgcgcgaggttaaccagatactgacgatggcagcgcagtagtggtgtacgactttccagggtacgtaatgtcaattcggtaaagccctctttcccttcgtggctggtaacgtagacaccgctcatccgactgctgacaaatgccacatctttcatttgcagcaaataaatccgactatgccccgtacaagggataaatttcagcgcctgttgattttccggtaacaggctaacatcctgcttgctgcgctcctgacgcaatcgcgccagcgttttctccagtcgcgcttcatcaattggcttcagcagataatcaaaggcatgttcttcaaaggctttaattgcgtattcgtcaaacgcagtgagaaaaacaatatacgggcgatgttccgggtcaagcatccccaccatttccagaccactgatgcgcggcatctggatatcgagaaacagcacatccgggcgcagtttatgcaccgcgccgatcccttccacggcgttactacactctccaacgatttcaatatcgctctgctcctgcaaaaatacacgcaggttctcccgtgctaacggttcatcatcgacaattaagactttaatcatgcctcgtccctccatggtagtcgtaacgttattcgggtgtaactatcaggctcacaggcgacgcttattccatagtcatcgccaaaccgttcacgtaaacgcttatccaccagattcatccccagcccactggcattggttaccggttgatacaaaccggcattgtcttcgatctccagcatcaaatgttgcccctcacgtcgggcgctgattgccactcgccctgtatccagcagttgacttgtcccatgtttaatggcgttttccactatcggttgcagggtaaacgcgggcaattgctgctgggataattcttgcggaatagcaatgttgacctgcaaccggctctggaagcgcgccttttcaatttgcagataagcattcacatgttcaatttcgtcggcgagagtaacaaactcgctaggccgctttaagtttttgcggaaaaaagtggaaagatactgcaccagctggctggcctgttcgctgtcgcggcggatcaccgctttaatggtgttaagcgcattaaacaaaaaatggggattcacctgggcgtgaagcagtttgatctcactctgggtgagcatcgctttttgccgctcatattgcccggcaaggatctgcgcgctaagcaattgcgcaatcccctcacccaacgtgcggttgatgctactgaataaacggtttttggcttcatacaatttgatggtgcccatcacccgctgattttcaccacgcaacggaattaccagcgtgctccccagtttgcattgcggatgcaaagagcaacggtaaggtacttcgttgccatcagcgtagaccacttcaccggtttcaatcgcttttaaagtataagtactagaaatcggtttgccgggtaaatggtggtcgtcaccaattccggtaaaggccagcaatttctctcgatcggtaatcgcgactgcaccaatatccagttcctgatacagcacctgagccactttcatgctgttcacttcgttaaacccctggcgcaaaatgccttccgtgctggctgccactttcagcgcagtggcagaaaaagcgctagtgtatttttcaaacatcgcgcgtttatcgagcaatatacgcataaacagcgccgcgccgacggtattggtgaccatcattggcgcagcaatattactcaccagacgcaccgcatcttcataaggtcgggcgatcgcaaggatgatcagcatttgcaccatttcagcgacgaacgtgacggcaccggcggtaatggggttaaagactttatcagtgcgcccgcggcggatcaggatgctgtgtaccaggccaccgagtaatccttcaacgatggtgctgatcatgcaacttaacgcggtcatgccccccatgctatatcgatgtaagccgccggtcagcccaaccagcccaccgacgaccggaccgccgagtaagccgcccattaccgcgcctatcgcacgggtattggcaatagaatcgtcaatgtgcaacccaaaccaggtgcccatgatgcagaagatggaaaagacgatgtagcagagaaatttatgcggcagacgaaccgtgacctgcattaacggtatgaataatggcgttttactcattaaccatgcaatgactaaaaaaacgcacatctgctgaagcagcagcaacaccagattaaaatcgtacatacccgcaaaccacacttccctttaaaacgcgtaacatacattgcctgcgtttaactttctttgaactcttgcagaaaaatgagaattcgtgagtacgatcactcaaaatcgcctggcaaaaataaaatcaccctatagatgcacaaaaaacgggcaaaactacctggttcgcaaaactgcgtctaaagttaaaccgggacctcgcgagcaagggtgagacgatggcgctttacacaattggtgaagtggcgttgctttgtgatattaatcctgtcacgttacgcgcgtggcagaggcgttacggattgctgaaaccgcaacggacagacggcggtcatcggctgttcaacgatgccgatattgaccggatccgcgagatcaaacgctggatcgacaacggcgtgcaggtcagcaaagttaaaatgctgctcagtaatgaaaatgttgatgtgcagaacggctggcgcgatcagcaagaaacattactgacttacctgcaaagcggcaatctacatagcctgcgaacgtggatcaaagagcgcggtcaggattaccccgcccagacactcaccacacatctgtttattcctctgcgccgacggcttcagtgccaacaaccgactctccaggcgctgctggcgatcctcgacggcgtactgatcaactacatcgccatttgtctggctagcgcacgtaaaaaacagggtaaagatgcgctggtggttggctggaatattcaggataccacccgtctgtggctggagggctggattgccagtcaacaaggatggcgcattgatgtcctcgcccacagcctcaatcaactacgccctgaactattcgaaggccgtacattgctggtgtggtgcggtgaaaatcgaacctccgcccaacagcagcaactcaccagttggcaagaacaaggccatgatattttcccactcggcatttaatgattcgttaacaaatgcgctttactgtacaatcctttcgttaacataaggagtgcattatgcgcatagctaaaattggggtcatcgccctgttcctgtttatggcgttaggcggaattggtggcgtcatgctcgcaggttatacctttattttgcgtgctggctaagcgcctgcaccagcctttcaaacaggcggtctgcgatgatcgccgccagtgccaccagtaacgccccctggatcacatacgcggtattaaatccgctaagcccgatgatgatgggcgtacccagcgtgctggcccctaccgtactggcgatcgtcgccgtaccaatgttgataatcacgctagttcgcacgcccgccagaatcaccggagccgccagcggtagctcgaccttacgcactcgctgaccacgactcattcccatacctttcgcaacttctgtcacgctggcatcaatcgctcccagcccggcaagtgtcgcctgcaggacgggcagcacaccgtaaaggatcaaggcgataatcgctggttgcagaccaaagccgatcaccggaacggcgatcgccagcactgcgacgggcggaaaagtctgtccaacggcggcaatagtttccaccagtgggcgaaattccgcgccccacgggcgagtgacagcaattccggcaccagtgccaatgatcaccgcaaacaaactgctaattcccaccagccagaaatgagccagtgccagagctgcaaaactttcttgctgataaacgggtcgtggcagttgtgggaacaaggcagcaaacagcggctggctgtaaggcagccagaaaatcagcgccacaaacagagcaatgagccagaacagcggatcgcgcaacatcttcatacgcttacgcctccaccagcagatcctgaaaatgcagcgtgccgcaaggctggccctgcatgttcaccaccggcagcacctcgcatccccgcgcaacaaacagagagagcgcatcgcgtagcgtcatctcttctgccagtgcctcaccatctgctcgttcttcgcgacgcacgtaatccgccacactacgtaagctaagcaggcgcacacccagttcactacgtccaaaaaactggcggacaaaatcattcgccggacgagtcagcatcgtcagcggattgccctgctgcactacttcaccgtgatccatcaataccagatgttctgccagccgtagcgcctcatcaatatcatgagtgaccagcacaatggtacgccccagcaaacggtgaatgcgcgtcatctcttgttgcaacgcgccgcgcgttaccgggtccagtgcgccaaaaggttcatccattagtaagacttgcggatcggcagccagtgcacgcgccactcccacacgttgctgctgaccaccggaaagctgatgcggataacgctcacgcaaattactctccagccccagtagcgccattaattcgtcgatacgatcgtcaatccgcgcccggctccatttttgtaattgcggcacggtagcgatgttttgcgccacgctccagtgggggaacaggccaatagattgaatggcatagcccatccggcggcgcaactccagtactggcaggctgcgaatttcttctccggcaaagcggatctctccgctgtcatgctccaccaggcggttaatcattttcagggtggtggatttgccggagccagatgtgccaatcagcacgctaaaactcccttcctgaaaattgagattgagatcgttaacggctttttgtgcgccgaacagtttgctgacatggctaaattcaatcattacgtttcaccttcagcagtgcgataagcaaatcgaacagcgcgtcggtaagcaccgccagaacaattaccgggatcacccccagcaacactaaatcaatggcgctgcttagcagcccctggaaaaccagcgcaccaaaaccgcctgcgccgattaacgccgcaatcaccgccatacctacagtttgcaccatcaccacccgcaggctgcgcagaaataccggtaacgccagcggtaactgaacatgcaggaaacgctgcgccccgctcatccccatcgctctggcgctttccagcacatcgcgcgggatctggttcaaaccgactaccacgccgcgcaccagcggcagcaaggcatagagcaccagcgcaatcagtgcgggtgtcattccggttcctgctatgccgagcgtccccagccacggaaaggccgtaaccagcgcggcaagcggcgcaatcaacaggccaaagagcgccacgctaggcacggtctgaatcacattgagcagagaaaaaattgccccctgccgagcagtggaaaagtagcaccagatgcccaacggcacaccaatcactaacgcaggcagcaccgcaccaaacagcaacgtcagatgttgtgccagcgcgtcgtcaaacacatcctgacggttggcgtattctttcattagactgagatcgttaagcgtgccggagtacagcaaccacagcggaataatggcaatctgcatatgcaacaaccagcgccacagcggatgcgtggagattcggcggatggcatcgctacaggccagcaatgccagcgccgcagccagccagaaaccactgccgaggctggtacgcgccagcgcactgccattttgcgccagttgggtcgccgcctttccagctccccacaccagcaatacgaagacgaattgcgccagaatgagtgcacaaatgctgccttttttaccgggaataaaacaggccgtcagccaggcgcaaccaacgcccaccagcatccagatcgtttgcggccacagctgccagagatgacgcccctcaccgctaactaaacgattaggcgcgtaactgataaacggcagcgccgctgcgattgccgtcagcaacagcagcagcgccagaacaggattaatacggaaataagtcacgggaaattacttcgtccaccctttttgtttcaggtagtcggcagccacttttttggcatccagtccttccacagcaatgctggcattcagttgctgcaatgtttttgcatcgaggctggcgaagactggctgtagccactgtgccatttgcggatactccctcaacacgctctcacgcaccactggtgcaggcgcgtagataggttgcacaccttgcggatcgcttaaggtttgcagccccagcgccgctaccgggccgtcagtgccgtaagccattgcagcattaacgccagaggtttgctgggcagcggctttgatcgtcaccgccgtgtcgccaccagccagactcagcaactgatcctgaccgagcttaaagccataggctttttcaaacgcgggtaacgcatcggcgcgttcgataaactctgcgctggctgccagtttgaaggtgccgccctcttgcagataacgactcaggtcggcaaggctagtgagtttatttttctctgccacatcctgacgcacggcgatagtccaggtgttatttgcaggcgcgggcgtcagccagattaacttgttgtgctcgctatcgagctttttgactttctcgtaaccttgctgcgcgtttttccacgctgcatcgttttcatctttaaagaagaaagcgccattgccggtatattccggatagatatccagttcaccggaagtaatcgccccgcgcaccacaggagtcgttccgagttgcactttattcaccgtcggtacgccgtggctttccagcacctgcaaaatgatattgccgagtagcgcaccttcggtatcgattttactaccgactttaacgggggaagccgcctgtagcggcaggctcacggctgccaacataaccagactacctgcccagagctttaagagtggcatgatgctttcctcattcttttactgttgttttcagcgaattaagagaaaagcatagttgataatggcggggttagcttgagcggaaggattcagttgcagaatcagataaatacttaagaggcatattcggtccggcgtttcctgccggatgcggcgcgagcgccttatccggcctacaaagggcgcaaacgtcgcgcccttactaaagcattacagcaactcaaactcgcctttcttaacgcgtgcggaatcagtgccgataaagacattgaacttgccaggctcggcgtcatatttcatctgttgattccagaacttcagcgcctcaatatcgatcgggaagctgacagtctgagtttcgcccggtttcagggtgattttctcaaagcctttcagctgtttcacagggcgactcatggaagccgtcacatcctgcaagtacatctgcactaccgtggcaccctcgcgcttaccggtgttcgtcacctgcacgctggcagtcactttgccgtcacgcttcatggtcggcgcagaaagtttcacatcagagacggtgaaagtggtgtagctcagcccatagccgaacggatacaacgccccgttagcttcatcaaaataacggctagtgtatttgttcggcttgtcggcattatacgggcgaccggtattcagatggctgtagtacaccgggatctgcccgacagaacgcgggaaggacattggcagcttgccggacgggttgtaatcgccaaacaatacatcggcaattgcattaccgccttcagtccccgcaaaccaggtttccagaatcgcatcagcctgctgatcttctttcaccagcgccagcggacgcccgttcatcagcaccagcaccagcggtttaccggtggctttcagcgccgcaatcaagtcacgttggctttgcggaatagtgatatcggtccggctggaggcttcgtgcgccatcccctgtgcttcaccgactacagccaccaccacatcagattgtttcgccgtctgcaccgcttcatcaatcatctcttgcgggctacgcggatcgactttgaccgcttcttcatactgattcaggaaatcgataatgcctttgtcactggtaacgttcgcccctttggcatacagcactttaccgttttcaccgacggcatttttaatcccggtcagtacggtcacggattgatcggcaacaccggctgcggaccagctgcccatcacgtcacgtttactgtccgccagtggcccaaccaccgcaatggtggcgctttttttcagcggtaacgtttcgagacggtttttcagcaacaccaagctttcgcgcgccacttcacgcgcttctttacggtgcaggcggctttcggcattggtatccaccgggtcagactctttcggccccaaatggctgtatgggtcgttaaacaaccccatatcatatttaacgttcagtacatggcgggcagcatcgtccagctctgccatcgtcactttgccggatttaatcaacccaggcagatacttgctgtagtactcgtcgctcatgctcatgttgattccggatttcagcgccacgcgcaccgcatcttccgggtctgccgccgtgccatgtttaatcagctctttgattgcaccgtgatcggaaacggtgatgcctttaaagccccactggtcgcgcagaacatctttcagcagccaggaatcggaggtggctggcgtgccgttcaggctgttcagcgccaccatcaccgcgccgctgcctgcgtccagccccgctttgtacggcggcatataatcattaaacaggcgctgcggactcatatcgacggtgttgtactctttaccgccttctaccgcgccgtatgcggcaaagtgtttgacgctggtcatcacgctgtagcgatctgccgggcttttaccctgcatcgcttccaccatggttttacccattgtactggtgagatacgtatcttcgccaaaaccttcggaagcacgtccccagcgcggatcgcggctgacatcgaccatcggtgcccaggtcatattcaggccatcatctgccgcttcataagcagagacacgtccgaccgttttcactgcatcgaggttaaaagagctggccagaccgaggctaatcgggaacaccgtgcgctgaccgtgcagcacgtcgtaagcaaagaaaagaggaattttcaggcggcttaattccatcacctgatcctgcatggcgcggatatcctgacgggttacggtgttgaaaatcgccccaacctgaccgtctttgatcatctcgcggatcgcctctttcgggttatccgggccgacgctgattaagcgcagctgaccaattttctcatcaactgtcattttcttaagcagttcggtgacgaacgcatcccgcgcttcgggcgttaatggatggttgccgaataaatcatccgccagtgctggctgcagggccagactcaccgcgattcctacactacatagccatttcatatggatttttcttcctttgttgcccgacgtggcagcgaaaatggtgcaaaaaccgtagtttgccataagcatgatggagagagaaaaagaatgctcagtttattgtctgaattttcaaaatattcactcgctgaattgttatacaaggcgctattctagtttgtgatattttttcgccaccacaaggagtggaaaatgtcttccatgacaacaactgataataaagcctttttgaatgaacttgctcgtctggtgggttctagtcacctgctcaccgatcccgcaaaaacggcccgctatcgcaagggcttccgttctggtcagggcgacgcgctggctgtcgttttccctggcagtctactagaattgtggcgggtgctgaaagcctgcgtcaccgccgacaaaattattctgatgcaggccgccaatacaggcctgaccgaaggaagcacgccaaacggtaacgattatgatcgcgatgtcgttatcatcagcaccctgcgtctcgacaagctgcacgttcttggcaagggcgaacaggtgctggcctatccgggcaccacgctctatagcctggaaaaagccctcaaaccgctgggacgcgaaccgcacagtgtgattggaagtagctgtataggcgcaagcgtcatcggcggtatttgtaacaactccggcggcagcctggtgcaacgtggcccggcgtataccgaaatgagcttattcgcgcgtataaatgaagacggcaaactgacgctggtgaaccatctggggattgatctgggcgaaacgccggagcagatccttagcaagctggatgatgatcgcatcaaagatgacgatgtgcgtcacgatggtcgtcacgcccacgattatgactatgtccaccgcgttcgtgatattgaagccgacacgcccgcacgttataacgccgatcctgatcggttatttgaatcttctggttgcgccgggaagctggcggtctttgcagtacgtcttgataccttcgaagcggaaaaaaatcagcaggtgttttatatcggcaccaaccagccggaagtgctgaccgaaatccgccgtcatattctggctaacttcgaaaatctgccggttgccggggaatatatgcaccgggatatctacgatattgcggaaaaatacggcaaagacaccttcctgatgattgataagttaggcaccgacaagatgccgttcttctttaatctcaagggacgcaccgatgcgatgctggagaaagtgaaattcttccgtccgcattttactgaccgtgcgatgcaaaaattcggtcacctgttccccagccatttaccgccgcgcatgaaaaactggcgcgataaatacgagcatcatctgctgttaaaaatggcgggcgatggcgtgggcgaagccaaaagctggctggtggattatttcaaacaggccgaaggcgatttctttgtctgtacgccggaggaaggcagcaaagcgtttttacaccgtttcgccgctgcgggcgcagcaattcgttatcaggcggtgcattccgatgaagtcgaagacattctggcgttggatatcgctctgcggcgtaacgacaccgagtggtatgagcatttaccgccggagatcgacagccagctggtgcacaagctctattacggccattttatgtgctatgtcttccatcaggattacatagtgaaaaaaggcgtggatgtgcatgcgttaaaagaacagatgctggaactgctacagcagcgcggcgcgcagtaccctgccgagcataacgtcggtcatttgtataaagcaccggagacgttgcagaagttctatcgcgagaacgatccgaccaacagcatgaatccggggatcggtaaaaccagtaaacggaaaaactggcaggaagtggagtaaaaattacggatggcagagtatcgccatccgaattcacttaatcgttctgtgccgtctgccccgccgccgccatttgggcggctttttgttttttatagctcaacgctgctgccggcacaggcatcactttaccggtttcaatccaggtacgcaggcggctggcatcggcaaaatgggtatatttgccaaacgcgtccatcactaccagcgccaccggtttattattgataaccgtacgcatcaccagacaatggcccgccgcattggtaaagccggttttggttaactgaatattccagttatcgcgatacaccagatgattagtattgcggaacggcagcgtatacgtcggattagagaaggttgccatatcttcccgggtagtacttaactgcccgatcaacggatattgtttgctggcaatgagcagtttggttaagtcacgggcagtactaacgttatgcacgctcaatccggtaggttcaacaaagcgcgtgttgttcattccgaggcttttcgctttcgcattcattgccttaataaaggctttgtaaccaccgggataatggtgcgcaaggcttgccgccgcgcggttttcactagacatcagcgccagcaacagcatatctttacggctgatttcgctattcagtcgtacgcggctatagacccctttcatctccggcgtctggctgatatccacttttagtttttcatccagcggcagtcgtgcatccagcacaaccatcgcggtcattaatttgctgatagacgcaatcggacgcaccagatccgggtggttgctatagatcactttgttggtattcagatcaacaatcatcgcgctaccggaggcaatttccggttgactagcggtggtagcggctgccgttttcgcaacggcctgcggtgcaaaaggcacagccagcatcagggccaggctaaataaagaaactcgaaatttcggcatgatgagcattcagatagtggttcacgcgcacgggttgcgcaccgccggagtaaggatttactgaggctagcgacgccatcataacgagcaaaaagtgcgatcgtcaaaggagaatcgtgaggaaatgctgcattgctgacatttacgccagcaatgcaacgtcaaagaactttttagaacaaacgataaccgtagccccatagtataacggttagggcgagcagcacttccagtaccagcacgccaatcgccagcgtgctactagagaagctaaggccttcctctttgttgatattcaggaagctcggaataccaaggtaaagcaggtagccggtgtaaaacagcgccaccgtgccgaccagcgcacacaaccagaccagtggataaagcgccaccagaccgcttaaaaacagcggagttgcaacgtagcccgcgaagaccatgcagtgcgcaagactcggacgctgcggataattacgcgccatccaccagatgacccgccccatcaccgcgaccccagccagcataacgccgtaaaacaagacagccagcgccagtccggtaaaccaggataacttcaggatagtgccatcgccaaaattccagccaatctgtgtagtgccaatgaaggcgcaaatcaccggaatcgccgccatcagcaaaacgtggtgggtgtaatggtgagaaatcgtttcgttttcgcgattaatcacctgcatttcacgatcgggatgggaaaacagtccccagacatggctcataccgcccccttgttgtgagttcatgaacctgacagttcaagtataagtcagcttgtgattattttttgttcgcccatgtaattttcactgtctgatgaacgtcctttttcagcgtgaatgattcacagggtgtatgcttactggcaaccaaagggagacagactggcctatggatctcaatacacttatcagtcaatatggttatgccgcgctggtgatcggtagcctggcggaaggtgaaaccgtgactttgctgggaggcgttgcggcgcatcaggggctattaaagttcccgctggtggtactttctgtggcgcttggcggcatgattggcgaccaggtgctctatctgtgcgggcggcggtttggcggcaagctgttacgccgtttcagcaaacatcaggataaaattgagcgggcgcagaaacttatccaacgccatccgtatctgtttgtcattggtacgcgctttatgtatggctttcgggtgattggcccgacgctgattggtgccagccagctgccgccgaaaatctttctgccgctgaatattctcggcgcatttgcctgggcgttgatttttaccactattggttacgctggtggtcaggtgattgcgccgtggttgcacaatctcgaccagcatttgaagcactgggtctggttgattctggtcgtggttctggtggtgggcgtgcgctggtggctgaaacgacgcgggaagaaaaagccggatcatcaggcgtaaaaccattgccctggataaggcgttcgcgccgcatccgacatccggagtaccatgcctgatacgacgcttgtgcgtcttttcatgccgaccaaaatattacccaatgaaatatccacgcacctcactgcgttattctgggttgaactgtggattcgccaacataaagccgccatccactatcaagctctgcccggtggtgtaatttgcgccctcgctacaaagccacaccaccaggctggcaatctcatgcgttgcgccaaaacgccgcaagggaatgctaggctccgcgtcgggcttcacgtcgctgtcatccatgccattcattggcgtggcgatcgccccaggcgcgactgcgttcaccaaaatcttatgcctgaccagctccagcgccatcgctttggttaacccaccgagcgcatgtttagcggctgtgtaggcgctggcatccggcagcggcgtatgttcatgtacgctcgtaatgttgatgatgcgaccgccctgcccttgtttcaccatctgacgagccgcaatttggctgcataagaatgcaccatcgacatcaacggtaaaaatcttgcgccactcatcaaaagccatatcaagaaacggcgctttggtcattgcacccgcattattcaccagcacatcaatgcgccccagccgttgaatgagtttctccagcgccagtgccccttctggtagattgccgagatccagctgcacgatctccgcacgtacgccgtggctaactacctcacgcgcggtatcttttgccccttcttcatcactgtgccaggtaataccaatatcaaacccctgctgcgccagtaataacgcgcactctttgccgatcccgctatcggaggcggtaataatcgcaacctgtgccatcgagttctccacttaacgctgaataaacgttaagtatagaaggcgcatatcatcagcgtttgtaccccccgcccaacgcaccagtgagttgaatggaggcatccagccactgcccttgcaataacaggccattggcccgctcacgcagcgcggggattctggcttcgctgacgcgggaaccagcaatgatgcccgcgttaaagcgcgcctgcgcaagacctaccacacgcaaggcatcgcgctcaatttgcgcctgatgctggtttttctccgccagtgtctgaacctgactggctgcccgcgccacgtcattcaccgcttcaaccaccgctttgttgtagctggcgatagacaagttgctttcggcttttgcgatatcgagattggcgttaagacgaccactatcgaaaatgggtagcgtcaggcctgccgtaacgcccatttgctgcgcggaatgacggaacagatcgcttaagtgcaacgcatcctgttgcaggaaggccatcaggttgatgtcaggataaaatgccgcttttgccgcatcaatggtgcttaggctactctcaacgtaccagtgcgccgcctgcaaatctgcccgccgggccagtaaggagtaccccagttcatcaggaagctggcttgccactttcggcaacgcgaccggtttaagcttcaaactctttgtctggttatttgtaagtgcgcttaaccgtgcctcaataattttcattttccccgcgacatcgttgagctgctgccgggttttgctggcattaatatcggtttccacaccttcaacactagaagtaatcccgttctgatatagctggcgatcggtcgcgataatggtgttctgctctttttctatttgctgcaagaccgtgtttaacgccgcctgggtttgccactcccagtacaggcgggctacgctgccagccagcaattggcgggtttgctcgcgttccgccgcccgtgctttaaccgtacccaggcgggcagtaacctccgcccgattctttccccagatatcgagatgccagcccgccgttaagccaaaagtaccgttggtgtaccacgggccggtcgtacctgcggccggatcgttcagagcaaacggccccattaagccttctgcgctcattttttgccgctccatatccgccgaaaagtcgatctgcggaccatcctgagtggcaactgccttcgcctgggcttcagctagctgaatgcgctgttcagccacctgcatatccggtgcgttctgtagtgcattgttaattaaggaagactgttgattatcgtgatactccagccaccattggctgtctggccaaccattttcagcgccgtgggtaatgcggtgtcaacttgtgcagcgggcgtttgctggcttaacgcctggcgggtttcatgcataggcgcacacccggccagcatcagtaacagcggaaaacaggcgatggctggataaaaggaatcacgattcatgggggaataatcaggtaagaaaaggtgcgcggagattaccgtgtgttgcgatatattttttagtttcgcgtggcaatacatcagtggcaataaaacgacatatccagaaaaatatacactaagtgaatgatatcttccgatttatcttaatcgtttatggataacggcaaagggcttcgttttttcctatacttattcagcactcacaaataaaggaacgccaatgaaaattatactctgggctgtattgattattttcctgattgggctactggtggtgactggcgtatttaagatgatattttaaaattaattaatgtcatcaggtccgaaaataacgagaatatttcagtctctcatcctgttgcgctcctgtcatgtgcattgcttcatataatcactggcgcaaggagcgcgcagggggcggccaatcgccgccgccccctgcacccccgggctctggcgaacaaaatcgccgctgcgcggtgccctcggcttatcccttacggctaccgggtcgggcgcgaggtaacatccctgtaaaacgcgccctcagcccacatccatgtgggctgccccggccttcagggaacgcctcggcaattttgacgccaccaaacaaccgtgcggcctattgataaagagctaacacattgtcaaaaaacatcactatggttttttagagtttctcgatatcaattgcctgaatagcccttgcaatatcaggggaattattcaacacccgaacatgctgaaataattccgttgcttcatcgtattctttacgcaaataactcaaccactgtttaatccgcgcaacgtgatataacccggtatcgccctgcttttccagacgggtatatttttgcagcaaagcaaccacctccggccacggcattcgcggttcgttatattttaccacccggctcaggttgggaatattgagcgccccgcgaccaatcatcactgcgtcgcagccgctgatcgccatgcattgttgcgcgctctgccagtcccagatttcaccgttggcaatcaccggaatattcagccgctggcgaatatcgccaatcgcctgccagtcaatatgctccgcgcggtaaccctgctctttcgtccgcccatgcaccaccagctccgtagcgccagcctgttgaaccgcatcggcgatttcaaatttcttctcaccgctgtcccagcccagacgcactttcacgctgacgggcaaatgcgccggtacagcttcacgcatcgcttttgcaccctggtagatgagttcaggatctttgagtaacgtcgccccgccgccgctaccgttaaccgttttgctcgggcagccgcaattgagatccacgccccaggaacctaactccaccgcacgggcggcgttctctgccagccattgtgggaactgacctaacaactgcacgcgcaccagcgtaccagatggtgtccggctggcgttttgtagctcagggcaaatgcgatgaaagacttttaccggcagcagttgatccaccacgcggacaaactcggtgatgcacagatcgtagtcgttaacttcggtcagcaattcacgcaccagagagtcaagcactccctccatcggtgccagtaacacacgcatatcatcacccgcaaaaaaatgaggcgctatgttagcgcctatggtcagcggattaaaggtctgcaaagagggattgctgcaaactgcaatccctctctatgcttgatgtatgcctgagttcgctgcgcattgcgtaatgccggggagcgaaaaaataagcgctgatttcttaatgtgatcggtagcacgttttacgaattaattgtatgatgaatccatctcatctggggtgttgattatgagtaagacactgaacattatctggcaatatttacgcgctttcgtcctgatttatgcctgcctgtatgcaggcattttcattgcttccctgctaccggtaaccattccgggcagcatcatcgggatgctgatcctgtttgtcctgctggccttgcaaattcttccggcaaaatgggtcaatccggggtgctacgtactgattcgctatatggcgctattgtttgtgccgattagcgtaggcgtcatgcaatattttgatttgctccgcgcacagtttggcccggtagtggtttcctgtgcagtcagtacgctggtggtttttctggtggtgagctggagtagccaactggtacacggtgaacgtaaagtcgtaggtcagaaaggaagtgaagaatgatggcgaatatctggtggagtttaccgctgacattgattgtcttttttgccgcccgcaaactggcggcacggtataagtttcccttgcttaacccgttgctggtagcaatggtggtgatcattccttttttaatgctgactggcatctcttacgacagctactttaaaggtagcgaagtgctaaacgatctgctgcaaccggcggtcgtcgcgctggcctatcctttatatgagcagctacaccagatccgcgcgcgctggaaaagcatcatcaccatctgttttatcggcagcgtggttgcgatggtgacggggacttccgtggcattgttgatgggcgctagtccggaaatcgccgcgagtatcctgccgaaaagtgtcaccacgcctattgcaatggcggttggcggcagtattggcggtattccggcaatcagcgcagtttgcgtgattttcgtcggcatcctcggcgcggtatttggccatacattgcttaatgcgatgcgtattcgtaccaaagctgcgcgcggtctggcaatggggactgccagccacgccctcggtacggcgcgctgcgccgagctggattatcaggaaggtgcatttagtagcctagcgctggtgttatgcgggataattactagcctgatcgcaccgttccttttcccgattattctggcagtaatgggctaaaatttgcgatgcgtcgcgcatttttgatgtatgtttcacgcgttgcataattaatgagattcagatcacatataaagccacaacgggttcgtaaactgttatcccattacatgattatgaggcaacgccatgcatccacgttttcaaaccgcttttgcccaacttgcggataacttgcaatctgcactggaacctattctggcagacaagtacttccccgctttgttgaccggggagcaagtcagtagcctgaagagcgcaacggggctggacgaagacgcgctggcattcgcactacttccgctggcggcggcctgtgcgcgtacgccattgagcaattttaatgttggcgcaattgcgcgcggtgtgagcggaacctggtatttcggtgccaatatggaatttattggtgcgacaatgcagcaaaccgttcatgccgaacaaagcgcgatcagccacgcctggttgagtggtgaaaaagcgcttgcagccatcaccgttaactacacgccttgtggtcactgccgtcagtttatgaatgaactgaacagcggtctggatctgcgtattcatctgccgggccgcgaggcacacgcgctgcgtgactatctgccagatgcctttgggccgaaagatctggagattaaaacgctgctgatggacgaacaggatcacggctatgcgctgacgggtgatgcgctttctcaggcagcgattgcggcggcaaaccgtagccacatgccttacagtaagagcccaagcggtgtcgcgctggaatgtaaagacggtcgtattttcagtggcagctacgctgaaaacgccgcattcaacccgactctgccaccgttgcagggagcgttaattctgttgaatctcaagggttatgattacccggatatccagcgcgcggttctggcagaaaaagccgatgcgccgttgattcagtgggatgccacctccgcaacgctgaaagctctcggctgtcacagtatcgaccgagtgcttctcgcttaagcctggtgccggatgcggcgtgaacgccttgtccggcttgccagccctctcctggtgtcgaaattcccggcaaacagtttgccgtttcttgcgcaaaaccagcgggtaaagtagcctgatggaaattttccttagatcgagtctcctgcatgttaaagcgcgtgttcctcagcctgttagtcctgatcggcttgctgctgttgactgtgctcggcctcgatcgctggatgagctggaaaaccgcgccttatatctacgacgaattgcaggatctcccctaccgccaggtcggtgtggtgctcggaacagcaaaatattatcgtactggcgtaattaatcagtattatcgctaccgcattcaaggagcgattaatgcctataacagcggtaaggtaaattatctattactgagcggcgataacgcattgcaaagttataatgagccgatgaccatgcgcaaagatttaatcgctgctggtgtcgacccaagtgatattgttctcgattacgcaggctttcgtacgctggattccatcgtgcgtacacgcaaagttttcgatactaatgatttcattattatcacccaacgtttccactgtgagcgagcattatttattgcgctgcatatggggattcaggctcagtgttatgccgtaccgagtccgaaagatatgctgagtgtacgtattcgtgaatttgccgcccgtttcggtgcgctggctgacctttatatttttaaacgtgaaccgcgttttttagggccgctggtccctattccggctatgcaccaggtaccggaagatgcgcaggggtatcccgccgtcacacccgaacagttacttgaattacaaaagaaacaaggaaagtaattatggatgtacagcagttttttgtcgttgccgtttttttccttatcccgatattttgtttccgcgaagcatggaaaggctggcgcgcaggcgcgattgataaacgggttaaaaatgcaccggaaccggtgtatgtctggcgagcaaaaaatcccggactctttttcgcttatatggtggcatatatcggcttcggaattttatctatcggcatgattgtttatcttattttctatcgttaatattcccctctccagttaattattgagaataattattacttcacctgataagctgcggatatcacattcctaaccgcagctatttgtgaatcttttcacagtttaaattcccccgcacgcttagccttaatatcagtacattattatttactaaacgctcgccttaattacctatagcattaaggaagatcacatgccgcaacaaaattatctggatgaactcactccggcttttacgtctttactggcgattaaagaagcctctcgctgtttattatgtcacgacgctccctgtagtcaggcttgcccggcacagaccgatccggggaaatttattcgcagtatctactttcgtaattttaaaggcgctgccgagacaattcgcgaaaataatgccctcggtgccgtttgtgccagagtgtgcccgacggagaaattatgccaaagcggttgtacccgtgccggtgttgatgctcccattgatatcggccgcttacagcgttttgttactgattttgaacaacaaaccggaatggaaatttatcagcccggtactaaaacgctcggcaaagtcgcgattattggcgcaggtcctgccggattgcaggccagtgtgacactgacaaaccagggttatgacgtcacgatttatgagaaagaagcgcaccccggtggctggttgcgtaacggtattccgcaattccggttaccgcaaagtgtgctggatgcagagatcgcccgtattgaaaaaatgggcgtgaccattaagtgcaacaacgaagtcggtaacacactcacccttgagcagctgaaagcagaaaaccgcgcggtactggtcaccgtggggttaagtagcggttccgggctaccgctgtttgagcatagtgacgttgagattgccgtcgacttcttgcaacgtgcacgacaggcgcaaggcgatatcagcattccacaaagcgcattaattatcggcggcggtgatgtcgcgatggacgtagccagcacgctgaaagttctcggctgtcaggcggtaacttgcgtagcgcgtgaagagttagatgagtttccggcaagcgaaaaagagtttaccagcgcccgggagctgggcgttagcatcatcgatggattcacgccagtagccgtggaaggcaataaagtcacgtttaagcatgtacggttaagcggcgaactgacgatggcggcagataaaattattctcgccgtcggtcagcatgccagactagatgcctttgcggagttagagccgcagcgtaacaccatcaaaacacaaaattaccagacccgcgacccgcaagtctttgctgctggcgatattgttgagggtgacaaaaccgtggtctatgccgtgaaaaccgggaaagaagccgccgaggcgattcatcactatttagagggagcttgcagttgttaaattaatatttagagggagcttgctcatgttaacgaaagatcttagcattactttttgcggcgtgaagtttcccaacccgttctgcctctcttctagcccggtaggcaactgctatgagatgtgtgccaaagcctacgacacaggttggggcggtgtggtgtttaaaacgatcggcttttttatcgccaacgaagtcagcccgcgttttgatcatctggtgaaagaagataccggttttatcggcttcaaaaatatggagcagattgctgaacatccgttggaagagaatctggccgccctgcgtcggctgaaggaagattacccggacaaagtattgatcgctagcatcatgggggaaaatgagcagcaatgggaggagctggcgcgcctggtgcaagaagctggcgcggatatgatcgagtgtaacttctcctgtccgcaaatgacttctcatgcgatgggtagcgatgtcgggcaaagcccggagctggtagaaaaatattgtcgggcagtgaaacggggttccacgctgccaatgctggcgaagatgacgccgaatatcggtgatatgtgcgaagtggcgctggcggcgaagcgcggcggcgcagatggcattgcggcgattaacaccgttaaatccatcaccaatatcgatcttaatcagaaaatcggtatgccgatcgttaacggaaaaagcagtatttccggatattccggtaaagcggtaaaaccgatcgccctgcgcttcattcagcaaatgcgcacccatccagaactgcgcgatttcccaatcagcggtatcggcggcattgaaacctgggaggatgcggctgagtttttattgctcggcgcagcaacgttacaggtgaccaccggcatcatgcagtacgggtatcggatagtggaagatatggcaagcgggttgagccattatctcgccgatcagggatttgatagcctgcaggagatggtaggtctggcgaataacaatattgtcccggcggaagatttagaccgcagttatattgtctatccccgtatcaatcttgataaatgtgttggctgtggacgctgttatatttcctgttacgacggcggtcaccaggcgatggaatggagcgagaaaacccgcacaccgcattgtaataccgagaaatgtgtgggttgtctgctttgtggtcacgtctgcccggtgggttgtattgagctcggggaagtgaagtttaagaaaggcgagaaagaacacccggtaacgttgtaaaaccagagacgcatccggcatttggttcctgtcgccggatgcggcttgaacgccttatccggcctacaaaaccatacaaatcagtatgttgagcttattgtaggccggataaaacgcgccagcgttgcatccggcatttggctcctgttgccggatgcggcgtgaacgccttatccggcctacaaaaccacacagatcatgatgttatgtgcgtttatgaccgaatgcggaccacattcacatcatttcttacgcgcgtatttcagactatccagcgctacggcgaagataataatcgcccctttgatgatgtactgccagtatgggtttacgccgatatacgtcaggccatagttgatgacggtaaaaataattaccccggtcaccacgccaatcaccgtccccacaccgccgctgaagcttacaccgcctaccacgcacgccgcgatagcatccagctcatacataaagccgaggttgttggtggcagagccgatacgtccggcttctaacatcccgccaaaggcatagaacacgccagacaacgcgtagatcatcagcaggttcaggccgacgttgacaccagatacttttgccgcttccgggttaccgccaatggcaaaaatgttcttaccgaagcgggttttgttccacaacacccagacgaacgccaccgcaatcaacgcgtagaaggtgatgtaagagagacggaaactccccagcgcgacaaagccctgagcaaaggtagagaagccactgtcaaaaccagaaattgggctcgccccgacaaagtcgtaatagaggctgttgatgccatagacgatgatcatcgtgccgagcgtggtaatgaacggcgtcacgttgagataagcgataatcagaccgttgatcaaaccgatcaccgcaccaatggcacagacaatcagaataaccagcgcaatcggcatcgtcgccatttccgggaacactttgttggcgttatccatggactgcaataatgtcgcagccaccactgccgccagccctacctgacgaccagcagaaagatcggtcccctgggtgacaattaaccctgccacaccgagcgcgataataatacgcacgctactctgggtgagaatattacttaagttcaacagacttaaaaatgttgggtcctggaaaataataatcgccagcaaaactaaaagaacgacgtaaataccgccctctttcaggtaagtaagaaaacttttcttatttaacgcactcatgggaagcccctaatcttaaaggtgcaaagacgcaagacgcagaatttcgttttgcgttgttgtttttgtatcgacaattccggaaacgagaccattgctcatgaccagaatacggtctgttatccctaacaactcaggcatttcagaggagataataataatccccttgcctttcttcgccagttcggcaattaactgataaatttcaaacttcgccccgacatcaataccgcgcgtcggttcatcgagcattaatatttctggttgcgttagtagccagcgaccaataatcaccttttgctgattaccaccggagaggctaccaatttgcgtccgatgacccggcgtttttacccgcatgctatcaatcacccactgggtatcgcttttcatccggctgttatccagtaaaccaactttatttttgtagttgcgaatattggaaattaagctgttaaaaccaatatccagataggcataaattcccgtactgcggcgctcctcagttaccagtgcaaatccatggtttatggcttcgttggcattatggttattgatctgtttgccgtgcaacgttatggtgccagcgcttttctcgcgaataccaaataacgtctcaacaatatcggtacgtttcgcccccaccagaccggcaataccgaggatctcccctttatgcagatcaaagctgacatcgcgaatgctcggctggcgcagactcgtcaggttacgtacctcgaggatgacttcgcccggtttgttttctttgtcagggaaacgctggttaagagaacgcccaaccatcatggcgatgatcttgtccatcgtcagtcctgccagcggttcggtggcgatccactgaccgtcgcgcaatacggtaacttcatcacataactggaagatttcttccattttatggctgatataaacaataccgcagccgcgctcttttaatttacgaataatagtgaacagatgattgacctctttttcggttaagctagaagtcggttcatccataatcacaattttcgcgttataggaaaacgctttggcgatttcgatcatctgcatttggctaacggataatgtgccgacgcgcgcacgcggatcgatatcaatatccagttcgtcaaaaatcgctttggtttcgcggtacattttgtcctgatcgacaaacatgcctttggtgggatatcgccccagccacatgttatccatcacgctacgttgtaataccaggtttaactcctggtgtaccatgctaataccattttccagggcttcttttgcagaatggaaatcgatctctttaccctggaataaaatggtgccggagtctttttgataaataccaaacaggcattttaataatgtgctttttcctgcaccgttttcccccattaatgcatggatagaatgtggccggacttttaaattaacgttatcaagtgccttaacaccaggaaaggacttgttgataccgctcatttccaacaagtattccccggaggacggagtcgtactgctgaccatataattttaccttgttggccatacaataagggcgcagtaatagactgcgcccaatcagtcttatttcttgctgaattcagccaggttgtctttatctacgccaacataaggtacgcggaccactttgttgtcgattttccagttggtgccatcagccgcacctttaccatcggccaggtttttcgccagatcaaaggtcgctttcgcctggttgttagcatcgttcagtacggtgcccgccagtgcaccggatttcaccagcgccagcgcttctggcagcgcatcgacgccaaacaccggaatgctggacttgttgtgtgctttcagcgcttcaaccgcgcccattgccatcgcatcgttgttggcgataaccacttcgattttgttggcgttcgggccagacagccaggcgtccatcttatctttcgcctgagcggtgtcccacattgcggtatctaactgtaactgttcagttttgatgcctttatcgttcaattctttaatcacgtaagtggtacgtgcttctgcatccggatggcccggttcacctttcagcagtacgaactgaatctgaccgtctttgttcagatcccaaccctgattcgccgcccagtgtttagcaatcaaatcgccttgaataatgccggactctttggagtcagtgccaacgtagtaggctttgtcgtagctatccagcgccttacgagacggttctttgttgaagaaaaccaccggcacgttttgcccacgcgctttctcaatcaccgtacccgcagctgccgggtcaaccaggttgattgccagtgccttcacccctttcgccagcaatacgtcgatctgatcgttctgcttggactggtcattctgagaatcattcatcagcagctgaacatctggcgcggctttcgcatcttgctcaatagccttgcgcactacagacataaagttatcgtcgtacttatagattgttacaccaatgcgagtatcagcagcgtgtgcagcggcaccgaataacatgctggccatcacagcagacagggttaacaccttcttattcatggtatctccggtttttcttatgcagggtagtgcttgagataaatgctcggcggggcagtagagttaatgaagtgttactgaacgccgaagctcactttttaaaattcgttcttccatgcccggtaacgctccagaaaacggctttaattgttgttatgacgctgttacctcggcaaaagtgattattcactgttacatacgggttacaacgttaaaacggtgcaatcatagctatcacattgttaagatactgtgaaatcactcacagattgaaagcggttacatcgcctgatttgtactgttagtgatcgccgccgcattctggcgtgttgcgacagaatggcgacgcactaacgtcggcataaaacagtggctggcacgaggatcaatattgcctgctgccccctgcaaggccagttcggtggctaatttcgccatactagcaatgggataacgcacggtcgttaattgcgggtcggtgtaacgggcgatgggaatatcatcgaaaccgatgatactgagatgtaacggaatcgcaatgccattatcttttaatgctgtcagtgcgccagcggccatattgtcgttataagcaaatacagcggtaagttgtagattgcgccccagcagttcaaccatcgccgcctcaccgcccggcatgtccggcgtaccagcgccaatccagctttccggcggaataatatcctgctctttcaacgcactcatccagcctgctttacgcatggcgtcatcttcaatgccgtggctggaagaaagataaccaatacgttgatgaccgttattcagcaacatgcgcgtcgccattcgggcaccgctgagattatccaggcaaacgcaacgatgggcgtaccccggcacaacgcggttgattaacaccataccgggaatgttatccataaattgcgccagttcatcgtcactcaatgctttactgtgaacaatcaacgcattacaacgctggcgaattaacacctcaatggcgtgacgctctttttccgcttcatgatagctattgccgattagcacgtatttctgatgctgctgagcgaccagatccaccgcttttaccagcgcgccgaaaaacgcatcagaaacgtccatcaccaccacgccaatggtgtcgctaacctgagttgccagcgcctgggcattggcgtttggccgataatccagctcactcacggctttcattactgcttcacgcgtgtcggcactgaccagcgtgctgttattgagcacccgggaaaccgttgccacagagacgccagcctgacgcgctacatcacgaatggtgatcatattcactacctgttatgagattgcagtaaatgactgcttgctggcggctattttgtcagcactgaatacaggacttcgtgaatcgagtcacagcaatggaaacggttacagccgttttgttaacgaatgtgatccagatcgttatctacttgttttagatattgccggtccggcagcacgcaaagttaactgacgccagagccattccaccggcccctggcggaagtaacgcagccagataacagagaagaggatattcgccagccataccggaataacaaacgccagcagctccaggcggtcaaaatgcataaacaaaccgaggtggtaaaaaagcgtggtacaaatcagcgtttgcaatagatagttggtcagcgccatccgtccgacgcaggcgatcgcaagcaccagcttaaagcggctcaattgcggccagaagccataaaacaggctcgcatagccaatcgcctgaaacggcgcactcagttcccgcggcatttgaagtaagaaggcacaccagcgatacgcccagtccagctgccattgcagggcgatggcaggaaggttaatggtcaccccaatcgccaccagcacaaaaccagtacgacgatagtgacgtaagctgaactgccctttcagccagccgctgcgcatcagcgccgcaccaatgagcatcatccctgccagttgccagccatactgtgcgcccagtgccagtaaactgttgccaacaccatcggcacgattactgatcgcttcaacgccgccgtgaagcttccagtatttttcatacaaaatagcgcttgcatccggcgtccaggcgcggctggtctggctgtcggaaatcagccccaataacagcaaaacgccaagccccaccagataaagcatgacgcctgtattaaacaggctttttacgcttggcgcatcgcgcaccagccgccagcagattaagcccaccagcccgtaagccagcaaaatatcgccgtcccagaacaataaaccgtgaataaagcccaacaagactaacagcgttaaccggctctggatccagcgtctgccacggggcagcaacatttgcaggcccgcaccaaacagtagcgcaaaaagcgtgaggaatttcacctggccgatgagatcaagaaatgcccaagtccatgcatcccgcggcgtaatagcaccgtaccaggcgggattgagataagccgcctttggtagcccaaaggcgctgatgtttaatagcaggatccccagaatggcgacgccgcgaacaaaatcgagcgtgacgttgcgctccatggttcctgccttttaatcagttgtgatgacgcacagcgcgcagaaactcgtggcgcgtattctgactggatttgaacaatccaccaagagaggtcgttgtcgtggcactggttgcatcgcggatgccacgcgccttcacgcagtaatgcaccgcgtcgatgctgacagccacgttattggtgcccagcagcgtttgtagcgcaataagaatttgctgcgtcagacgttcctgcacctgcggacgctgggcaaagaactgcacaatgcggttaattttactcagaccgatcacgctatctttcgggatataggccaccgtcgctttgccatcgatggtaacaaaatggtgttcacaggtgctggtcagagtgatatcgcgcacggtgaccatttcatcgaccttcattttgttttcaatgagggtgattttcgggaaattggcgtaatccagaccggagaaaatttcatcgacatacattttagcgatgcgatgcggcgtttccatcaaactgtcatcagccaggtcgagattcagcagctgcatgatttcggtcatatgaccagcaataaggcttttgcgcgtttcgttatccatttcatgcacgggcgggcgcagcggtgtttccagtcctcgcgcaactaacgcttcatgaaccagggccgcttctttactgagacttggcatttatgatttctcctgcaggtgtgacgcctccgccctgcgtgggggcaaagttattaagctgatttacagcctgattattgtgcgtgaggcggcgcacataatccagtattcacagcgataattattgtaattgccgctgcctttcatcagcagatgttaaaacatcgttatgcaaatacggaagtgaaagttactcacagcacattgaataaacggtatgatgaagaaattgcaaacaacacaacaaggagccacgcatggaaatgctcgaagagcaccgctgttttgaaggctggcagcaacgctggcgacacgactccagtaccttaaactgcccgatgacgttcagtatctttctccctccacctcgtgatcacactccgccaccagtgctgtactggctttccggattaacctgcaatgacgagaacttcaccaccaaggcgggtgcccagcgggtagcggcggaactggggattgtactggtgatgccagacaccagcccgcgcggcgaaaaggttgccaacgacgatggctacgatttaggccagggcgcaggcttttatcttaatgccacgcaaccgccgtgggcgacgcattaccggatgtatgattatctgcgcgatgaattaccggcgctggttcagagccaatttaatgtcagcgaccgctgcgccattagcggtcacagtatgggtggtcacggtgcgctgattatggcgctgaaaaatccgggtaaatacaccagcgttagcgcctttgcgccaattgtgaatccgtgcagcgtcccgtggggaatcaaagcgtttagcagctatttaggtgaggacaaaaatgcatggctggaatgggacagttgcgcactgatgtatgccagtaacgcgcaggatgcgatcccgacgcttatcgatcagggcgataatgatcagtttcttgccgaccagttgcaacctgcggtactggcagaagccgcgcgccagaaagcgtggccgatgacgctgcgtattcagccgggatatgatcacagttactacttcatcgcctcttttatagaggatcacctgcgcttccatgcgcagtatttactgaagtgaaagtccgcccggttcgccgggcatcttctcatcagaagcgataatccactgccataaagtaacgacgtccgtcttcgttatagctgtagtcgtcacgactgagatccttgtcgccaaggttcagcacgcctgcgcgcagtttgacgtctttagtcacctgccaggccgcgccggtattccagatggtataaccgcccggtgttttagccgtcgcgctgtcggcgcgtttctgcccggtatagtgcccagaaacatagaaactccagtcttccagcgccagcggtttccagtccagcgtaccgttagcagtatggaacggcagatcggatagcggtttgttttcgccgttgctgacatcacgaccatcgttgtaggtgtagttgatgctcagtttccattcatcgttgaacggaattttcagttcggtttccacgccctgaatacgagctttgttaacgttgtagtagctaaataccggtatgcgccgtccgttagcgcccgtctcaaaaccaacaaagttttggtagcccggtgcagcgttgacgtcagacgtacggctgatgctgatacgatctttcacatcgttacggaaaacggtaacgctggattcaaccccttccagccagccttcttcacccatgtagtaaagccccagctcccaactttcgctggtttctggtttcagatccgggctacccacaatcttacatgcgccacggcaggaattgctcgtccagtcagggctaagttgcaacagagaaggtgctttaaatgccgtcgcccagccccctttcaccgttacggtgtcggtggcgttataaaccaggtaggcacgcggactccagtgttcaccgtaggtttcgtgatcgtccatacgcacgccggtcgtcagcgccagcggctcgaagatccgccattcatcttccacaaacagcgcgtactggctggcagacgttttggagctggttcccccggtcaggttcaccgcatcgctaagtttgtcgtgacgccattcaccgccaaccgtgagaaactgattaatcgccgtcagcggcaacgtgtatttgccgtcgaccgtattgctttcggaagttatcgggctgctgttgccagggtttttgttctcgactttctcaccgtagtatttcagttcgctggtgccgtaatcccaacgcccattatggctgacggagtagttctggcgttccaggcggtttttgtccaggctgtcggaatcacgatcctgacggtcgaaaccgtatccggcagtaaaatcgtgattttgattcggtgtccaggcaaattcgacattgccgtcgcggctggagaatccttcaatacgcggcgtttctccggtatcggtggtcgtactgttttgcgggtcatccttttcacgttttgccaggctgccgtaagctttcattcccagcacaccatcaattaatggtccactggtaaagaactgaccgttataggtgtcaccgcgatcgcgatgttcctgaatggtggtatcgacggtaacggtaccgctccatttctgaccgatttttttggtgatgatattcactacaccgccgagcgcatcggaaccgtacaggctgctcatcgggccacggaccacttcaatacgttcgatggaatcgaccgggatccagttcagatcgaaatcattgtggcggaagacggcattgcgggagttcacgcgtttaccgtcgacgagaatcagggtatagctgctgtccagaccacgaatactaacgcccttacggttatccccttcgttcgtcagttgtacgccaggcacttctttgaggacatccttcagattctgtaccggttttcgctgcaggtcttcctgggtaatgacgctgatactggcaggtgcatctttaagattttgttccacggaagatgcagtgacaaccatcgtttcgccatcatcatcgaccgctaacacaggccatgcacaagaaatagcggacaaacacagcccgacccgtacgaaagggttcaacctaaacattccatatctccatgaggtaactacgaaaataaaatgggttatcgctcacatcttcttcacgtccccttgcgtacggcagcatcgcggtggacttattttttatgcaggtgatcatcccagaaagccggaacagcctctgatttgtcagccttttttgattgcggcgtaacgataatgcaaacgataacaattatcaatccaaatgttaaattttatatccgcatgatttgtcagggaaatggaattgaaaaagccctctcggttgagagggcttagcaaggaagggaggaaacttatttcttatcgttctgcgggaacttcatttcgctgtagcgtacgaagtgagttcctttaatcagcttgtagccgaaccaaataatcaggaacagcgggataccaatatacgttgccgctacgccgccccagtcaatagtatctttcaggaacgcttcgtagttctggcccaaagtgataatcagacacagaatgaatgcgaagatcggccccagtgggaagaaaccactacggtacggcagatcgttaatgtcgtgtccctgcaatacgtaaccgcgacggaagcgatagtggctaatggcaatccccagccaggcgataaaacccgtcatcccggaggtgttcagcagccacaggtataccgtctggttgccaaacatggaggtcaggaagcacagaccggcaatcaccgtcgtcgcatacagcgcattacgcggcacgccaccacggctcagtttagcgaaaatgcgcggcgctttaccgtcacacgccagggtgtacagcatacgagtagacgcatacataccggagttacccgcactcagcaccgccgtcagaataactgcgttcatcaccgccgccgcagagagcagacccgcgtgctggaacaccagggtgaacggactaacgctgatgtctttaacatcgttacgcagcaggctcggatcggtgtacggaataatcaggctgataatcaggatcgcgaacacatagaacaacaggattcgccagaacacctgacgtaccgcgcgtggaatgtttttcgccggatcttcggactcgcctgcagcaataccgatcagctcggttccctggaaagagaagccgacaatcatagctacgccgatcatcgccgcaaaaccaccagcaaacggcgcttcgccgattgtccagttgctccagcccgcaggctgcgcgcctttgaagataccgataatcatcagcacgccaacgatgataaagacaataactgtcgtgactttgatcagactgaaccagtattccgcttcaccaaagccacgaacactgatgtagttcagcaggaagataacgccgaggaacaacgcactccagatccagcccggtgtatccgggaaccaccagctcatgaccagctgagctgcaaccaggtcaacggcgatagtcaccgcccagttgtaccagtagttccagcccagcgcgaagccaaagccttcttcaacatagttctgaccgtaagtggcaaagctaccggaaaccggcatatatgcagccagttcaccgagactggtcatcaggaagtaaaccatcaggccaatcagcatatagctgagcaatgccccgcccggacctgcctgagaaatcgttgcgccagaggcaacaaaaagacctgtaccgatggaaccgccaatggcaatcatcgtcaggtgacgcgcctttaattcacggcgtaagcccggcgcttctgtggttttagtttcggaaaccatacaaaaatgctatccatcttaaaaatgaggcgcgattgtagcagacgattggcaatccttccggcagaaatacacggttataagacaccttcatgatcgcccagggattataagtaaagcagccaatctcttttctggcgaatgcatgctgaaggcgctgcgtcacgaaatcgacacagcaccagcatgttcttgtacagcaacttaacgcggcacatttgcgggatcgcaatagtccagaaagcgccgtagcgcgttggaaaggtgtttttgccgatgatgtatacgccacaacgtacgcatcaggcgcggcagagggaccgcaacttcacttaatgtgcctgcctgcaattgatcttcaatcacacgtcggctcaggcaactaattcccaacccatgacgcaccgcatgtttgattgcctcggagttacctaattccatcgccatctcaaacttcggtaaatgactcagcaacagataatcgacaatctcccgcgtgccggaaccgcgttcacgcaggatccacggcgcagcggccagctgttctaaggtgaccggaccacgggccaacgggctagtcggcgcggcgaaaaccaccagctcgtcttccagccacggttcagaaatgatttcagtgctgtggcacggtccttcaataaagccaatatcaacgcggaaatccagcaccgcttgcatcacgtcctggctattcccaacgctaagttcaatcggcaactgcggataatcatggcgataacgggcgataactgcaggcagaatgtagttaccgatggtactactggcatagatacgaatcgcgccgttgtcttcgcgaaacagttgttcgatttcaaccgcctgttcaagcaatgccaacgcacgcggatagagcagccgcccgtgttcattaacaaccagtcttttccccacgcgatcaaacagttgcacgccaagctgcccttccaggtcggtcaaggctgcgctcactgcactttggctcaacgccagcatcacgctcgcctgggtggtacttccacttttcaatacttctgcaaaaacttccaactgccggagggtgatgtgcatagtcgcttaccacttataaagattaattataaatatataatcaattttatttttaaaccagttagtcgtaaccttatgcccggttaaaggagagggttatgacgaatatcaccttacagaaacaacatcgtacactgtggcattttattccggggttagccctgagtgcagttatcaccggggtcgccctgtggggtggttccattcccgcggttgcgggtgccgggtttagtgccctcaccctcgcaatcttgttggggatggttttaggcaacaccatctatccgcacatctggaaaagctgtgacggtggtgtgctgtttgccaagcaatatttattacgtctgggtatcattctttatggcttccgtctgacgttcagccaaattgccgatgtcggtatcagtgggatcatcattgacgtgttgacgctgtccagtaccttcctgctggcttgcttcctggggcagaaagtgtttggtctggataagcacaccagctggttgatcggtgccggtagcagtatctgtggtgctgccgcggtactggcgactgagccggtagtgaaagcggaagccagtaaagtaaccgtggctgttgcaaccgttgttatcttcgggaccgtcgcgattttcctctacccggcgatatatccgctgatgtctcaatggtttagtccggaaactttcggtatctacattggttctactgtgcacgaagtggcgcaggtggtggcggcaggtcatgccatcagcccggatgcggaaaacgcagcagttatttccaaaatgctgcgcgtgatgatgctggctccgttcctcatcctgctggcggcgcgtgttaaacagctgtctggggcgaacagcggcgagaaaagcaaaatcactattccgtggtttgccatcttgttcatcgtagttgccatctttaacagcttccacctgttaccgcagagcgtggtgaacatgctggtaacgctggataccttcctgctggcaatggcgatggcggcgctgggtctgaccactcacgtcagcgcgctgaaaaaagctggggcgaaacctctgctgatggcactggtactgtttgcctggctgattgttggtggtggtgcgattaactatgtgattcaaagcgtcatcgcataaaccactacatcttgctcctgttaacccgctatcattaccgttttcctccagcgggtttaacaggagtcctcgcatgaaatacattggagcgcacgttagtgctgctggcggtctggcaaatgccgcaattcgcgccgccgaaatcgacgcaaccgcgtttgccttgttcaccaaaaaccaacgtcagtggcgtgccgcaccgctcacgacgcaaaccatcgatgaattcaaagccgcctgtgaaaaatatcactacacaagcgcgcaaattcttccccacgacagttatctgattaacctcggacatccggtcactgaagctctggaaaaaagccgcgatgcctttatagatgaaatgcagcgttgcgaacagctggggctttctttgctcaacttccaccctggcagccatctgatgcagattagtgaagaggattgccttgcgcgtattgccgaatccatcaacattgcgctggataaaactcaaggtgtgacagcggtgatagaaaacaccgccggtcagggcagtaacttagggtttaaattcgaacatctcgcggcgattatcgacggcgtggaagataaatcccgcgtcggcgtctgcattgatacctgccatgctttcgctgccgggtatgatttgcgtactccagccgaatgcgagaaaacattcgcggattttgcccgtactgtcggctttaagtatctgcgcgggatgcaccttaacgatgcgaaaagcacctttggcagccgcgttgaccgccatcatagcctcggtgaaggcaatatcggtcatgatgcgttccgctggatcatgcaggacgaccgtttcgacggcattccgctgatcctcgaaaccatcaacccggatatctgggcagaagagatcgcctggctgaaagcgcaacaaactgaaaaagcggtagcctgaagatgaataaccgggaaaaggagatccttgcaattttacggcgtaacccgctgattcagcagaacgaaattgcggacatgctgcaaatcagccgtagccgcgttgcggcgcatattatggatttaatgcgcaaaggccggattaaaggcaaaggttacattctcaccgagcaggaatactgcgtagtggtggggacaatcaatatggatattcgcgggatggcggatatccgttacccgcaaagcgcttctcatcccggtacaattcattgcagtgcgggcggcgtgggacgcaacatcgcccacaatctggcgctgttaggccgtgacgtccatttgcttagtgtgattggcgatgacttttatggcgaaatgctcctggaagaaacgcgccgtgccggcgtgaatgtctccggctgcgttcgtttgcatggtcaaagcacaagcacgtatctggcaattgccaatcgagacgatcaaaccgtgctggcgattaacgatacccatctgctggaacagttgacaccgcaactactgaacgggagccgcgatttacttcgtcatgcgggcgtggtactggctgattgcaacctgacagccgaggcgctggaatgggtctttaccctcgctgatgaaatcccggtgtttgtcgataccgttagtgaattcaaagcgggcaaaatcaaacactggctggcgcatattcacaccctgaaacccactttaccggagctggaaattttatggggacaggcgatcaccagcgatgctgaccgtaataccgcagtgaatgcattgcatcagcaaggtgttcagcaactgtttgtttatttgcccgatgagagtgtttattgcagcgaaaaggatggagaacaatttttgctgaccgcgccagcgcatacgacagtagacagttttggtgctgacgatggttttatggcgggcctggtatatagctttcttgaaggatacagtttccgcgacagcgcccgttttgcggtagcctgcgcggcaattagccgcgccagcggcagcttaaacaaccctaccctgtctgccgataacgcgcttagtttagtgccaatggtgtaacaatgttgccggatgcgacgcttaacgcgtcttatccggcctacaaatcaggcaatttcagcaagtaaatgtaggcctgataagcttgcgcatcaggcaatgacactcaagctaaaccaataaagaacccggcaatggtcgcactcatcaagttggaaagcgtcgccgccgccagcgcccgtaaaccaagctgggcgatttccggcgcacggtgtggcgcaaccgcagaaaacgcccccaccaccaccccgatagaaccaaagttagcgaaaccgcacaacgcgaaggaaataatcgccacagttttagcatcgagagtgccagccgtttgcagatagggactgaaattgagataagcgacaaattcatttattgccagtttctgtccaatcaaactcccggcaagattcgcatcactccagtccacacccatcacccacgccagtggagccagcaggtaacctaaaatggactccaggctggcatgttcaaaaccaaaccagccaccaacgccgccgataataccgttaatcaacgcaattattgcaacaaatgccatcaccactgttgccacacctgcggcgattttcagcccggtcattgcccctgtcgcagcggcttcaataatgctttttggcggtgtttcggtgaaagagaggttattaaaggaaacctggctagattccgttgccgggcttaacaggcgggcaaacaagatcccgccagggatcgccattaaacttgccgccagcagatattccacaggcacgcccagtgcggcgtaaccaatcattgtgctaccagcaatgctggccatgccactacaaatcgctgtaaataattcattgcgattcagacgatcgataaagggtttgacgattgccggaatttcgttttgcccgaggaaaatggtggtgaccgcgacgaaactctcgatcttgctgatatttaatgctttctggaagataccgccgagaattcgaattaaaatccccatcacaccgatgtagtagagaatactcaccagcgcggtgacgaagataattgccggtaacaccctgaaaccaaagataaatcctgcaccatcaaataaggtatccattttcggtccgaccagagaaccgaagataaatgcgctacccgcgtcgctgtacgccatcactttatgcacgccaaaagcgactttttcagcgacccaacgccctggcggtaaccaaagcataatgccgccaatcacgacctgtaacactaacgccgcgccaacggtacgcaggctgatcttcttcttgtttacactcagtaaaaacgcaatcgtcagcaataccaccattcccagaacacttctcatgacatccatagtgattatctcttcatgtcatattgggcgacggctttctgcccatcagaaatagccaggcctgcatcttgcgataccggcccggcttgttatcaacacttaatgggttttgatgtagccgcgcacgcactcttcgactaatccccagaaccagtctgtatcaatagtgatgccgactttggtattggcgggcttgccaagaacgcccagctcgtcgcagacggtacgcccatagcaagggccactgttgacgtccacttcgacgtacatctcctgggttttaatgccatcagggttaatcagataaccgatgcaggtggcgtcgtgcaccgggccgccagcaaggccgtagttttcgaactgcgttttgagagtgaagttcatgatgtcgctgaacagctctccggcggggccgcctgccctttccatccgagcaatcacgtccggggtgcaaacggtctggttggtgagatcgaggcccatcatcactaatggaacgccggaggtgaacactacgcgtgcggcttccgggtcggcaaagatgttgaactcggcagatggcgtgaagttgcctgtaccgtaagcgccgcccattagcacaatttcacggattttgggcaggatcgcgggttgcatacgcattgccaccgcgatattactaagcggaccaaccggcaccagagtgatatcgccatcgcttgccatcagggtatcaatgatatatttcaccgcatgagtgctttctgcctggcgggtcagcggctcgaataccgggccatccagtccggtttcaccgtgaatattatcggcaacgatttgttgacgcataatgggctgcggcatccccgcataaaccggaacattaatctccagtttctggcaaacattcaggccattaattaatgttttatcaagcgtctgattacccgctacaatagtgatgcctaataaatctattgccggatgtttcgccgccatcattatagcaatagcatcatcatgacccggatcacaatccagaataatttttctcttttccattgtttatttcctctgtttccagttgcgttattttttctacagcaaagaaaattcgaccgggccgatgattgaatcttaacaacagcgtacgtatgctaaatatgagaaatctcatagcggataaacatcgtgaaagaaatccacaataatgatcttaagcagcaattgatgagtgaatccgcgtttaaggattgctttttaacggatgttagtgccgatacgcggctgtttcattttttagcgcgtgactacattgtgcaggaagggcaacagccgtcctggctgttttacctgacgcgaggccgcgccaggctttacgccacgctagctaatggtcgcgtgagcctgatcgatttctttgccgccccctgttttattggcgagattgagttaatcgataaagaccatgaaccgcgtgcggtgcaggctattgaagagtgttggtgccttgcgctccctatgaaacattaccgtccgctgttattaaacgacacgctatttttacgaaaactctgcgtcaccttaagtcataaaaattatcgtaatattgtttctttaactcagaatcaaagttttccgttagtgaatcgcctggcagcatttatattactcagccaggaaggtgatctttatcacgaaaagcatacgcaagcggcagagtatttaggcgtttcttatcgacatcttttatatgttctcgcgcagttcattcacgacggtttattaattaaaagcaagaaagggtatctcattaaaaacagaaagcagttgagtggactggcgctggagatggacccggagaataaattctccgggatgatgcagtaaaaattattttcaatagcgcgattgccggatgcaacgcttaatacgttttatccggtctacaaatcgagcattacgccagaccaataaagaacccggcaatagtcgcactcatcaggttggaaagcgttgctgctgccagcgcccgtaaaccaagctgggcgatttccggcgcgcgttttgggctaatagcgctaaatgcgccaacgacaacaccgatagaaccaaagttagcaaaaccacaaagcgcaaaggagataatcgcaatggttttcacttccagcgtgccgcccgtttgcaggtatggggagaaactcaggtaagcgacgaattcgttaatcgccagtttctgcccaatcaggctacccgcaagattggcatcactccagtccacacccatgatccacgccagcggtgccagcacatagccaaaaatactttccagagaggcattggcgaaaccaaaccagccgccaattccgccgataatgccgttgatcagcgcaataattgcgacaaacgccattaccaccgtcgccacaccagcggcgatttttagcccggtcatcgcaccgctcgccgccgcttcgataaagctttttggcggcgtttcgctgaagctcagattttcaaatgtgacctggctaggctcggttgccgggctaagaatacgtgcaaacaaaatcccgccagggatcgccatcaggcttgccgctaacaggtagtcaattggtacgcccattccggcataaccaatcatcatgctaccagcaatggacgccatcccgctacaaattgcggtaaacaactcgttgcgattcatgcgatcgataaacggtttaacgatcgccgggatctcattttgcccgaggaaaatagtagtaaccgcaacaaaagattcgattttgctgatgttgagggctttctggaaaatgctgccaaggatgcgaatcagcagccccatcacgccaatgtagtacagcagactgatgagcgcagtaacgaaaataatcgccggaagtacgcgaaaggcgaagataaaacccgcaccgtcaaacaggacatccattttcggcccaaccaggctaccaaaaatgaaggcgctaccggcatcactgtaagacatcactttatgaacgcctaatgccgcctgttctactgcccattttcccggtgggaagtagagcatgatgccaccaatagcgatttgcagcagcagtgcggctccaaccgtgcgcaaactgatgctctttttattcacactcaacagaaatgctattgccagtaacaccaccatccccacaacacttctcattatatccataatgattttcccttcatgccggtaaacccggcgtcagcgccaggttttggtatgcttgatgagtacgggcgacggctttctgcccgtcagaaattaacccgcgagacgctgatattctttggcaatttcgctcgccagaatggcgttgttgaacaccagctggatgttggatttcaggctgtcaccgccggtcagttcagcaacgcgcgccagcaggaatggcgtactttctttaccaatgactccctgagcttcagcttcagctaccgcctgatcgatcgccgcattgatagtgtgttccggcatagcaaactgttccgggatcgggttcgctaccacgaggccaccgttcagaccgctttgccatttcaccaccattgcacgggcaatttcgctggcgctgtcgagacgaatgctgacgtcaaacgggctggtgcggcagaaaaacgcaggcagcgctttagtctgatagccaattaacggcacaccgaaggtttctaaatactcagtggttaatcctaaatcgagaatagatttcgccccggcacaaacaacggtgacattagtatttgccagttcttgcaaatcggcagaaatatcgaaggtatgttccgccccgcgatgcacaccaccaattcccccggtggcaaatactttaattccggcaagcgccgcaataatcatcgtactagccacagtggttgcgccattttttccggcggcaacaacaaaaggtaaatcgcgacgactaactttggtcacgttatgcccttcacgacccagtaattcaatttcttctttgcttaaccccactttcatcacgccgccaataatggcgatcgtggcaggtacagcgccctgtttacgaatagtttcttcaacttcaattgcggtctgggcattttgtgggaacggcatcccgtgagaaataatggtgctttccagcgccacaaccggttttttgttttttaaagcgtcctgcacttccggggaaatttgtaataattcaggggaaatttttaattcagacattctgcgttctccactaagcttataacgttggcaatgcttaaatcggggttattggtgtattcacaggagagcgccatactgctacatccctgtgcgaaacgaacagattcggcaaacggcattccgtctacccaacagctagcaagtcccgccatcatggcatcgcccgctccggtaacattaataacattggttttgatcggcgcagaccagccactttcaccgctgatatcgctgtaataaacgccgtcgccgcccatgctcaataccagtcggttcaggccatgttgatggaaccaggcagcaacttttgccacatcttcacgcccactcagcgcaatcccactcagggtttccgcttcaaggcggtttggcttgagagtgtggatctgatttagacggtcgcgcactttgacacatttccatgcgctaaccggatcgacaaatacgggtacgttggcggcattatccagaatccatgccagtgcctcttcactgatattacagtccgcgacaatgacctttgccctctgaataaattcaccgtgctgtgcgagatattcagctgtaatagcgttgctaatattcatgtcatttatagcaaccagcatttcaccggtattatcgagtaaacttaaataactgctcgtattttctcccggcacaatcaggcatttatcgacataaacgccagattgattggtttgcgttagcaggctttgaccataaaaatcactgcctacggcgctcagtagccaggctttgttacccagcaacgccaggttttgtgcaatattgcgccctactccaccaggcgtaaattttattttacctggattactatccgcataatttaaactttcatgactatatccggcgacatcaatattcgcgctacctataattacgacataatccttttcgcgcatagcacgtcctctggtaaaaaattaccaaccctgtcaatccacaagaatatagatactgcaaagacggtttaaacatgtgttcatatttaaacatgtgctcatagtatgcatgttttacgtaaagtaaattaccgccagagaggcaaaatgggcagatttgagcaggctcacaaaatgcgattaaatgcctgaattacaaaagcgaggaatttgtgacgggatgcacagaacagaacaataaaaaagggcagaaaataatctgcccttgaggaaataacctgagtgtttgatgaacgtttgaagtttctactgaaagataaaaccatttaaattcataaaattacattcacaaaccggtcattctctttgcgctcatcaaatgttacaggacaggaaatttctgccctgtaacacaccttttattacgctgctttcgctactgcgtccacttccggacgtttcaggaaggcataggccaaacccgccaccagcgtaccggcaataattgctaccaggtaacccaataccggcgtaatagcgccagggatcagcagaacaaacagaccaccgtgcggtgccatcagtttcgcaccaatcgccatactgattgcgccagtcagcgccccacccacgatacagcacggcagcacacgcatcggatcacgagcagcaaacggaattgcaccttcgctaatgaagcacagtcccaataccagagcggctttgccaccttcctgctgcgctttgtcgaatttgcgacgcgccaccattgttgccagacccattgccagcggtggcaccatacctgccgccataatcgccgccatcgggccataggtttgagtactcagcagacccacaccgaatgcgtacgctgctttgtttaccggaccgcccatgtcagtacacatcatgccaccgaggatcgcccccagcagaaccgcattcgcagtccccatggtctgcagccagtgagtcagcccttcgagaatgccagcaactggtttaccgatcaggtagatcatcgccagaccgaccaccagactggaaattagcggaatgatcaggatcggtttcagcgcctccatactctgtggcagtttcaattgcgtactgattaacttcgcaatgtaaccagccaggaagcccgcaataataccaccaatgaagccagaaccggtgctgaccgccagcataccgccaatcagacccggagtgaggcccggacgatcggcaatggaaaaggcaatataacctgccagtaccggcaccatcagcgcaaaggcactaccaccaccaatctgcatcagcgccgcagccaacgtacccggctctttaaacgcttcgataccaaaagcaaaagaaagcgcgatacacagaccacctgcaacgaccatcggcagcatgtaagaaacgcccgtcagcaagtgacggtatgcgcctgcactctctttcttactttcagtggtcgccgtttgagctttgcccgccggttcatacggcgttgcttcagcaaccgctttatccagttcctgcgcggttttcttcagcgccagaccggtagaggtacgatacatcggtttaccagcaaatttcgccagatccacttcgatatctgccgccacaatcaccagatccgctgctgcgacttcttcgggagtgattgcattacccgcgccaacagaaccacgggtttcaactttcacccaccagccacgttttttcgcttcggtttcaatggcttcagccgccataaaggtgtgtgctacgccagtcgggcaagcagtcaccgcaactacgcgtttcggaccgctggcggcaactggtgctgtcgcagcgaccggcgcagtgtaaggtttcgcatggcctttggcttcactcaggaacagctcagggtgcgcaactgcccgggaaatatcgcccagccagacatttttaccgttcagcgcgctgtcgttcgggatggaatcaccgagaacaatcgccatttcagcgtcgttcggattgtcgatgatttccagttttgcttttcgcgccgccgcgcccagcagggtcttcgccatataggcgcgtgcctgaccgagattagcgtcaataatcagcagcgttttcattatgcctctcctgctgtcagttaaaaggttgtaagtcgacgcgcgccatcattgcggccaactgcggacgatcggtaatacccacattgctttgacttaccgccagggctgcaacagctgtcgccagacgcagtgtgtgttcactggattcacgcatcagcaagccataaatcaggccaccaaccatagaatcccctgcgccaacggtgcttacgacatcgacactcggtggtttggcgatccattcgccggaggcattaacccaaagcgcgccttcggcacccagactaataacaacatgcgcgatgccttgttcacgtagcgcatgtgcagcttcaatcacatctttcatttcaggcagtttacggcctgcccagatttccagctcgcggcggttaggtttcaccagccacggtgccgctttcaaacctgctactaacgcttcacggctactatcaaagataatgcaaggacactgactacgcaggcgagtcatccagtcggtgaacgcttccgggctgacgccactcggtaagcttccgctgacacagaccatatcgaactgaccgagccagctcagagaatcagtcacaaagcgttcccagtcggcgggggtgacttcaaaaccgctgaagttgaagtcggtcacttcgccgtctttttccgtcagcttaacgttaattcgggtgcgcccctgtacaacctggaaacggttggcaatgcccagctcgctgaacagttgctgaaaaccatcctgattgtctttacccaggaagccgccaacggtgacatcaattcccaggtcttttaatactttggccacgttgatgcctttacccgccgcatgcagaccggtggttttcaccaggttcacttcgccgcgttcaatttccgggcagaaaccaacaaggtcataagccggattaagggtgatagtagcaacacgtctgctcattatgcgccctccccaagaccagcagcgatagcgtcgccgattgctttcagcgcctgttcagcatctgcaccctgggcggtaaagcgtaggcgatgacctttcttaacgccaagtgccacaactttcatcagactacgtccgtttgccggtttgccggtaccatcaaggtttgtcacggtaatatcactgttaaattgtttaatggtattgaccagcatggtacctggacgagcatgcaggccgtgttcattgcgcaccacaaactccgcgcttaacacgtcgtcggtcggcgcatcatcgctggtcagcagcgccagcaacgttgccgcatccgctttcagcaagcggtcagctttattgtcgagcaataaatcagcgagacgcttaagaaccgcgatgggctgatcgtcattcatcgccacactcaccagcatggctgccgtttcgccgtccacatcaaaagcatttgccgcacggcttaccgcaatcgcgctacgcagattgccttcggcgctatcgctcagccagataccctgtccgagattcagcggttgttcattgatggctttggtgacgaaagtggcgtcaactgcccccgcctctttcagacgcgcagcgttcagcgcctgaagagtcagcagatcgctggcgacgatatccagtgtcagcatttcgttgtcgagcttcagctgctcactctgcttttcgcccatcagtaatgcgcgaagttcttctgctgttgttgcactcttcagttgttcagcaacggaatcatcgctcagtacgtgggtcagctggcgtagcaggcccagatgttcatcgctgctggcagcaataccgattgccacgtacgctacctgaccgtcaccccaggtgacgccttccgggaactgaaatacctgaacgccggttttcagcacctgatcgcgggtgtcggtagtgccgtgtggaatagcaataccattgccgaggaacgtactggtttgctgttcgcgcgccagcatgccattgacgtagccttctgctacattaccggcctgcaccagcgccgcagcgacctggcgaatcgcctcttctttgtctccggccttttcgcccggatggatgtcctgtacggataactggaacatagttctcctctcttgctgaattgaaacgattcagcctctatgagaaaaaaagcgccaacctggcttagggttaaagacaagatcgcgctgaaacgtttcaagaaagcataatacttctgtttcagcacgcaaggaaagccgtaaagttatgagcaaaagtttgatgtgctgcacaattttttgccatttttcctaattgctgatgggaaaatccgttatcagcaatttcatttcagcagcgtcagcagccaatcagcaacagtgaaatggcattttgactattcgtggcgcttttgatttcgctgtctgtttattttctgacaagcagcgtaaactccgcgtcttcctcttccagtgatcgaccagcatgcataactcccccgcagtctccagcgcgaaaagctttgacctgaccagcacggcgtttttaatcgttgcctttctcaccggtattgcgggcgctctgcaaaccccgacactcagtatttttcttaccgatgaagtacatgcccgtccggcgatggtgggattcttctttaccggcagcgctgtcattgggattctggtaagtcagtttctcgccgggcgctctgataagcgcggcgatcgcaaaagcctgattgtcttttgctgcctgttaggcgtgctggcctgcaccctttttgcctggaatcgcaactactttgttttgctattcgttggcgtctttcttagcagctttggcagcaccgctaacccgcaaatgtttgcccttgcccgtgaacatgccgacaaaaccggacgtgaggcggtgatgttcagctcttttttacgcgctcaggttagtctggcatgggtcattggcccaccgctggcttatgccttagcgatgggtttcagctttacggtaatgtatctgagcgcagcggtagcgtttattgtttgcggtgtgatggtgtggctgtttttaccgagcatgcgaaaagagcttccgctggcgaccggcacgatcgaagcgccgcgccgtaaccgtcgcgatacgctgctgctgtttgtcatttgtacattgatgtggggcagcaacagcctgtacatcatcaacatgccgctatttattatcaacgaactgcatcttcccgagaaactggccggtgtgatgatggggaccgccgccgggctggaaatcccgacgatgttgattgccggatatttcgccaaacgtctgggtaagcgtttcttaatgcgcgttgctgccgtgggtggcgtctgtttttacgcaggaatgctgatggcgcatagtcctgtcattctgttgggcttgcagctgctaaatgctatttttattggcattctgggcggcatcgggatgctctattttcaggatctgatgcccggtcaggcgggtagtgccaccacgctctataccaacactagccgcgtgggctggatcatcgcaggaagtgtggcgggcatcgtcgccgagatctggaattatcacgctgtgttctggtttgcgatggtgatgattatcgccactctgttttgcttactgcggattaaagatgtttaaggcgcggtcagcatttccagatcgataagccaggtcatggcctgctgacggctgttaccgcacatttcagcgctggcttgtaagcctgcacagactttcggtcgcagtgggctggtgaaaattttacagcgttgctgttcatcaagctgaatgcagggcgtattggcgggcttgccatctggcataccgggaatagggctggaaatactaggggcagtgcaacacgccccgcaacccggacggcattccatacgttgttctcttaaggttaaccaccggattgatgagcgcgcacagtaccaccttttttgcaccagcaaaagtgcgaataccacttgcccgaaaggcccgtcgcgagtactttgtcgcgatatttttgacattttcgactacaggaatttttcgatgccaagagcgaacgaaattaaaaaaggtatggtactgaattacaacggcaaactgctgctggttaaggatattgatattcagagccccactgcccgcggtgccgctacgctgtacaaaatgcgtttttctgatgtccgtaccgggctgaaagtagaagagcgtttcaaaggtgatgatatcgttgacaccgtgacgctgacccgccgttacgttgacttctcctatgtcgatggcaacgaatatgtctttatggataaagaagactataccccgtataccttcaccaaagatcagattgaagaagagttgctgtttatgccagagggcggcatgccggacatgcaggtgctgacctgggacggtcaactgctggcgcttgagctgccgcagaccgttgatctggaaatcgttgaaaccgcaccaggcatcaaaggggcatctgccagcgcccgtaacaaaccggcgacattgagcactggtctggtgattcaggtaccagaatacttaagcccgggcgaaaaaattcgtatccatatcgaagaacgccgttatatggggcgtgctgactaacttcagccgcatgcagaaaagggatagctcaggctgtcccttttttaatttattataccaatcttctattttgcgcttcctgaacaccttacgccctcaattttcactcgttgattgatcgccctcacacttcatcgcattaacaatccagaccaatttcaattgctgtcatataactttacactgtcgttgttaattaatcgttactaagacgtgactcctatgaatacaatcgcctccgttacgctcccgcatcatgtacacgctccacgctatgatcgccagcagttgcaaagtcgtatcgttcattttggctttggagcctttcaccgcgctcatcaggcgttactgaccgatcgtgtgctgaatgcccagggcggcgactgggggatctgtgaaatcagcttgttcagcggtgatcaactgatgagccagctccgcgcacagaaccatttatataccgtgctggagaaaggtgcggacggcaatcaggtgataattgtcggtgccgttcacgaatgccttaatgcaaaactggattccttagcggcaattattgagaaattttgcgagccacaggtggcaattgtttccctgacgattaccgaaaaaggctattgtattgacccggccaccggtgcactcgacaccagtaatccgcggattattcacgatctacaaacccctgaagaacctcactccgcaccgggtattctcgtcgaagcactgaaacgccgccgtgagcgcggccttacaccgtttaccgtgctctcctgcgacaatattcccgacaatggtcatgtggtgaaaaacgcggtgctgggaatggcagaaaaacgtagcccagaactcgccgggtggataaaagagcacgtcagttttccgggaaccatggtcgaccgcattgttccggctgcaaccgacgaaagtctggtggaaatcagccagcatctgggggtgaatgatccctgcgcgattagctgcgaaccgtttatccagtgggtggtggaagataacttcgtcgctgggcgtcctgcctgggaagtcgcaggtgtacaaatggtgaatgatgtcctgccatgggaagagatgaaactgcggatgcttaatggcagccactcttttctcgcttatctgggttacctcagtggattcgcccatatcagtgattgcatgcaggatcgcgcatttcgccatgccgccagaacattaatgctggatgagcaagcgccgacactgcaaattaaagatgtcgatttaacacaatatgcggataagttaattgcacgttttgctaatccggcgctgaaacataagacctggcaaatcgcgatggatggcagccagaaattaccgcaacgcatgctggcaggtattcgcatacatcaggggcgcgaaacggactggagcttgctggcattaggcgttgcaggctggatgcgttacgtcagcggcgttgatgatgccggaaatgccattgatgttcgcgatccgcttagcgataaaattcgcgaacttgttgcgggcagcagcagtgaacaacgcgtaaccgccctgctttccctgcgtgaagttttcggtgatgatctgccagataacccgcattttgtgcaggccatcgaacaagcctggcaacaaatcgtacaattcggcgcacatcaggcgctattaaacaccctcaaaatttaacgatttctgcggttaaagcggatgaagctcaccttcgtccgctctccccttctcttttctgccttttttagccaggattaacgctcagttaacttaccagagtattgcggagccgttgtgaccaggaccaacctcatcaccggttttctcggcagcgggaaaaccacgagcattcttcatctgttagcccataaagatcccaacgaaaaatgggcggtactggttaatgaatttggggaagtcggaattgatggtgctttgctcgccgatagcggcgcattgctgaaagagatccccggcggctgcatgtgctgcgttaatggtttacccatgcaggtagggttgaataccttactgcgtcagggaaaaccagaccgcttgttgatagagccgaccgggctgggccatccgaaacagatcctcgatctgttaaccgcaccagtctatgaaccgtggatagatctgcgcgccaccttgtgcattctcgatccgcgcttgctgctggacgaaaaaagcgccagcaatgaaaacttccgtgaccagctggctgccgcagacatcattgtcgccaataaatccgaccgtacgacgcccgaaagtgagcaagcgctacagcgttggtggcagcaaaatggtggcgatcgacaattaattcacagtgagcatgggaaagttgacggtcatcttctggatttgccgcgtcgcaatttagccgagttgcccgccagcgccgcgcattctcatcagcatgtcgtgaaaaaagggttagcagcgttaagcctgccagagcatcaacgctggcgtcgcagtctgaacagcgggcaaggatatcaggcctgcggctggatattcgacgctgatacggtattcgacaccattggcattctggaatgggcgcgacttgcaccggtggaacgcgtcaaaggcgtgctgcgtattcccgaagggctggtgcgaatcaaccgtcagggcgatgacctgcacattgaaacgcaaaacgttgcgccaccggacagccgtattgagctgatttccagcagcgaagctgactggaatgccttgcagagcgcgctgttgaagcttcgtttagcgactaccgcgtaaggttgcctgcgtttttcagtaagataattagagaaaatatgattaaaaatttgccgcaaatagtgttgttgaatattgtcggcctcgcgctgtttctttcctggtatatccccgttaatcatggattctggttgccgattgatgcggatattttttatttctttaatcagaaactggtcgaaagtaaggcctttttgtggctggttgcattgaccaacaatcgcgccttcgacggttgtagtctgctggcgatgggtatgttgatgctgagtttctggctgaaagaaaacgcccctggcagacgacgtatcgtgattattggtctggtcatgctattaactgcagtggtattaaaccagctgggtcaggcattaattcctgtaaaacgggccagcccaacattgacttttaccgatattaaccgcgtcagcgaactgctctctgttcccacgaaagatgccagtcgagatagctttcccggcgatcacggcatgatgctgcttatttttagcgcattcatgtggcgttatttcggcaaagttgcaggccttatcgcccttattatttttgtggtttttgcatttcccagagtaatgattggcgcacactggtttactgacatcattgtcggtagcatgaccgtgatattgatcggtttgccctgggtgttgctgacgccattaagtgatcgattaatcaccttttttgacaaaagtctaccaggaaaaaacaaacatttccaaaacaaataactcacagtaattaacatcatcagggttatttttatagtgaggataatcctgatgatgcgcaccgtgctttcatctatcgaacgcaaaaatcattctctaagtaaatgaatggattgcatgcgtttcactcaattgtactttaattgaccaaccccgcttattaactttctgtatcactttttcttataaaaaatcatgtaaaaccgctcgccaagaccgcaccaatcgggtaatctcgaactcgttttgcctcggcggtagattatcctcacagcatataattttgtgcgttagtccacagatttggccttaaggaattgtttcaacatgcccaggtaattagtctcgtgtcgcttggcatttttttataacgatatttgtcgttaaggacttcaagggaaaacaaacaacatggtcaaatctcaaccgattttgagatatatcttgcgcgggattcccgcgattgcagtagcggttctgctttctgcatgtagtgcaaataacaccgcaaagaatatgcatcctgagacacgtgcagtgggtagtgaaacaagtagtctgcaagcttctcaggatgaatttgaaaacctggttcgtaatgtcgacgtaaaaagccgaattatggatcagtatgctgactggaaaggcgtacgttatcgtctgggcggcagcactaaaaaaggtatcgattgttctggtttcgtacagcgtacattccgtgagcaatttggcttagaacttccgcgtagcacttacgaacagcaggaaatgggtaaatctgtttcccgcagtaatttgcgtacgggtgatttagttctgttccgtgccggtagtacgggacgccatgtcggtatttatatcggcaacaatcagtttgtccatgcttccaccagcagtggtgttattatttccagcatgaatgaaccgtactggaagaagcgttacaacgaagcacgccgggttctcagccgcagctaataaaccgtttggatgcaatcccttggctatcctgacgagttaactgaaagcactgcttaggcagtgcttttttgttttcattcatcagagaaaatgatgtttccgcgtcttgatccaggctatagtccggtcattgttatcttttaaatgttgtcgtaatttcaggaaattaacggaatcatgttcatacgcgctcccaattttggacgtaagctcctgcttacctgcattgttgcaggcgtaatgattgcgatactggtgagttgccttcagtttttagtggcctggcataagcacgaagtcaaatacgacacactgattaccgacgtacaaaagtatctcgatacctattttgccgacctgaaatccactactgaccggctccagccgctgaccttagatacctgccagcaagctaaccccgaactgaccgcccgcgcagcgtttagcatgaatgtccgaacgtttgtgctggtgaaagataaaaaaacattctgtagttctgcgaccggtgagatggacattccactcaatgaattgattccggcgctcgacattaataaaaacgtcgatatggcgatcttacccggcacgccgatggtgccgaacaaacccgcaatcgtcatctggtatcgcaaccctttgctgaaaaatagcggcgtctttgccgctctgaatctcaacctgacgcctagtctcttttatagtagtcggcaggaagattacgatggcgtcgccctcattattggcaatactgcgctatctaccttttctagtcgtttgatgaacgttaacgaattaaccgacatgccagtccgtgaaactaaaattgcgggcattcctctgaccgttcggctttatgcagatgactggacatggaacgatgtgtggtacgcatttttactgggcggcatgagtggaactgtcgttggcctgctctgctattacctgatgagcgtacgtatgcgccccggcagagaaatcatgaccgccatcaagcgcgaacaattttacgtggcgtatcaaccggtggtggatacacaagctttgcgagtaacgggcctggaagtactgctacgctggcggcatcctgtcgcgggagaaattcccccggatgccttcattaactttgccgaaagccaaaagatgattgtgccgctgactcagcacctgtttgagttaattgcccgcgatgccgcagaattagaaaaagtgctgccggtaggcgtcaaatttggtattaacattgcgccggaccatctgcacagcgaaagctttaaagcagatatccagaaactgctcacttccctgcccgcacaccatttccagattgtgctggaaattaccgagcgcgatatgttgaaagagcaagaagccacacaactcttcgcctggctgcacagcgtcggcgtagaaattgctattgatgacttcggcaccgggcacagcgcgcttatctatcttgagcgttttacgctcgattatctgaaaattgaccgtggatttatcaacgccatcggtacggaaacgatcacttcccccgtacttgacgcggtgctgacgctggcgaaacgcctcaatatgctgacggttgctgaaggggtcgaaacgccggaacaggcgcgatggctaagcgaacgcggcgttaatttcatgcaaggctactggattagccgcccgttaccgctggacgattttgttcgctggctaaagaaaccgtatacgccgcagtggtaaggtgtgcttacgtcccttattattcatagtgaaagcatgccggattgcggctaatgatgagtaaaaggaaatccgttgcagatgattgtgcgcatactgctgctgtttatcgctctgttcacctttggtgtgcaggcgcaggctatcaaggaaagctatgcctttgccgtgctgggcgaaccccggtacgcgtttaatttcaaccattttgattatgtgaaccccgccgcgccaaaaggtgggcagataacgttgagtgccctcggcaccttcgataatttcaaccgctatgcactgcgcggcaacccgggcgcacgcaccgagcagctgtacgacacgctatttacgacttccgatgacgaaccaggcagttattacccgctgattgctgaaagcgcacgctatgctgacgattattcctgggtggaggtcgctattaatccgcgcgcccgttttcatgatggtagccccattactgcccgcgatgtagagtttacttttcaaaaatttatgaccgaaggcgtgccgcaatttcgtctggtctacaaaggcaccaccgtcaaagccattgcaccgttaaccgtgcgcattgagttagctaaacccggtaaagaagatatgctgagtctgtttagcctgccggtatttccagaaaagtactggaaggatcacaaacttagcgacccgctcgccacgcctccgcttgccagtggtccgtaccgcgttacgtcctggaaaatggggcaaaatattgtctattcccgtgtgaaagattactgggcagcaaacttaccggtaaaccgtggacgctggaatttcgacaccattcgctacgattattacctcgatgataatgtcgcctttgaagcgtttaaagcaggtgcctttgatttgcgtatggaaaacgacgccaaaaactgggccacgcgttataccggtaaaaatttcgataaaaaatacatcatcaaagatgagcaaaagaacgaaagtgcccaggatacgcgttggctggcgtttaatatccaacgtccggtattcagcgatcgccgggtccgggaagctatcactctcgcctttgactttgaatggatgaacaaggcgttgttttacaatgcctggagtcgcacgaacagttattttcagaataccgaatacgcggccagaaattaccccgacgccgcggagctggtgcttctggcaccaatgaaaaaagatctaccgagtgaagtcttcacacaaatctaccagccgccggtatccaaaggcgatggctacgatcgtgacaacctgttaaaagccgacaaacttctcaacgaagcgggctgggtgctgaagggtcagcaacgcgttaatgccacaacgggtcagccactcagctttgaattattgcttcccgcaagcagcaatagtcagtgggtattgccgttccagcacagcctgcaacggctgggtatcaacatggacattcgcaaggtggataacagccaaatcactaaccgcatgcgcagtcgcgactatgacatgatgccgcgcgtatggcgggcgatgccgtggcccagttccgatttacagatttcctggagtagcgaatatatcaattccacttataatgcccccggcgtgcaaagcccggttatcgacagcctgatcaaccaaattattgccgcgcagggaaataaagaaaaattactgccgttggggcgagcactggatcgcgtattaacgtggaattattacatgctgccaatgtggtacatggcggaagaccgtctcgcctggtgggataaattctcccagccggccgtgcgccccatctatagcctcggtatcgatacctggtggtatgacgtcaataaagcggccaaactgccgtccgccagcaaacagggagagtaaatgggcgcttacctgattcgccgtctgttgctggtgatcccaacattatgggcgattatcaccatcaactttttcatcgtgcaaattgcgcctggcggtccggtcgaccaggccatcgccgccattgagtttggtaatgccggagtattacccggcgcaggcggtgaaggtgttcgtgccagccatgcgcaaacgggtgtcggcaatatcagcgacagtaattaccgtggcggacgcggattagatccagaagtgatcgctgagatcactcatcgctacggttttgataagccgatccacgaacgttacttcaaaatgctctgggactacatccgctttgattttggcgatagcctgtttcgcagcgccagcgtgctgacgctgattaaagacagtctgccggtttccatcaccctcggattgtggagcacgctgattatctatctggtgagcattccgttaggcattcgcaaagctgtttataatgggagccgctttgacgtctggagtagcgcatttatcatcatcggctacgccattccggcctttttgtttgccatcctgctgattgtcttcttcgcgggcggcagctatttcgacctgttccctctacgcggcctggtttccgctaactttgatagcctgccgtggtatcagaaaatcaccgattatctgtggcatatcacgctgccggtgctggcgacagtgattggtggctttgcggcgctgaccatgctgacaaaaaacagtttccttgatgaagtgcgcaagcaatacgtggtgaccgcgcgtgcgaaaggggtaagtgaaaaaaatattctctggaaacatgtgttccgcaacgccatgctgctggtgattgccggttttccggcgacgtttatcagcatgttttttaccggcagcctgctgattgaggtgatgtttagtctcaatggtctgggcttactgggctacgaagcgaccgtcagccgcgattatcctgtaatgtttggtaccttgtatattttcaccctgattggcctgctgctgaatattgtcagtgatatcagctatacgctggttgatccgcgtattgattttgagggacgttaatgagccgactcagccccgtcaatcaggcccgttgggcgcgttttcgtcataaccgtcgcggctactggagcttatggattttcctcgtcttgtttggtttgagtttgtgttctgaacttatcgccaacgataaaccgttgctggtgcgttatgacggcagttggtatttcccgttattgaaaaactacagcgaaagcgattttggcggcccgctggcaagtcaggctgattatcaggacccgtggctgaaacaacggctggaaaataacggctgggtactgtgggcaccgattcgctttggtgctaccagtatcaactttgctaccaataagcccttcccttctccaccctcccggcaaaactggctgggaacggatgccaacggcggcgatgtgctggcacgcattctctatggcacgcggatcagcgttctgtttggcctgatgctgactctctgttccagcgtgatgggcgtgctggcgggggcgctacaaggctattacggcggtaaagtcgatctctggggacaacgctttattgaagtatggagcgggatgccgacgctgtttttgattattttactttccagcgtcgtacagcctaacttctggtggctgctggcaattactgtcttgtttggctggatgagtctggtcggcgtggtgcgggcggagtttttacgtactcgtaatttcgactacattcgtgcggcacaggcgcttggcgtcagcgatcgcagtatcatcctgcgtcatatgttgcctaatgccatggtcgcgaccctcacctttttaccgtttattttatgtagtagcataaccaccctgaccagcctcgatttcctcggcttcggtctaccgctcggtagtccgagtctcggtgaactgctgttacaagggaaaaataaccttcaggccccgtggcttgggatcaccgccttcttgagcgtggcgatattattgtctttgctgatctttattggtgaagccgtccgcgacgcatttgatcctaataaggcggtgtaacatgacgcaaactctgttagcgattgaaaatttgagcgtgggttttcgccatcagcaaaccgtacgtacagtagtcaatgatgttagtctacagattgaggctggcgaaacgctggcgctggtgggtgagagtggtagtggcaaaagcgttaccgcgctgagtattttacgcctgctcccttccccgccggttgaatatctctccggcgatattcgttttcatggcgaaagcctgcttcacgccagcgatcaaacgttgcgcggtgtacgcggtaataagatcgccatgatttttcaggaaccgatggtgagcttaaatccattgcataccctggaaaaacagctttatgaagtgcttagtctccaccgcgggatgcgtcgggaagcggctcgtggcgaaattcttaactgccttgatcgcgttggtatccgccaggcggcaaaacggctgacagattatccgcatcagctctccggcggcgaacggcagcgggtgatgattgcgatggcgctgttaacgcgaccggaattattaattgccgatgaaccgaccaccgcactggacgtctctgtccaggcgcagattttacagctgttgcgcgaactgcaaggcgagctgaatatgggcatgctgtttattactcataacctcagcattgtcagaaaactggcccaccgcgtggcggtaatgcaaaacggtcgctgtgtcgagcaaaattacgccgctacgctatttgcaagtcccactcatccttacacacaaaagctactcaacagtgaaccgagtggcgatccagtgccgttgccagaacctgccagtacgttgctggatgttgaacagcttcaggttgccttccccattcgcaaagggattttgaagcgcattgtggatcataatgtggtggtgaaaaacatcagttttacgctacgagcgggtgaaacactgggtttagtgggcgagtccggttccgggaaaagtacgacgggactggcgctgctgcgactgattaattctcagggcagcatcatctttgacggtcagccactgcaaaatttaaatcgccgccagctgttacctattcgtcatcgcattcaggtggtatttcaggatccaaactccagcctcaacccacgactcaacgttttgcagattattgaggaaggcttacgggttcaccagccgacgctttctgccgcacaacgcgaacaacaagtgatagccgtgatgcatgaagtgggattagatcctgaaacacgccaccgttatccggcggagttctctggtggtcagcgacaacgtattgcgattgccagggcattaattcttaagcccagcctgatcatacttgatgaaccgacaagtagtctcgacaaaacggtacaggcgcaaatattgacgctattgaaaagtttgcaacaaaagcatcaactggcctatttgtttatcagccacgatttgcacgttgtccgcgcgttatgtcatcaggttatcatactgcgacaaggggaagtagtggaacaaggaccgtgcgcgcgcgtgtttgccacaccgcagcaggagtatacgcgtcagctactggcgttgagctgacgcttaaaaaggattgtagttactaaagggttcggcaattgccacaccaaaatttttcaatcggcatgttgcagcaaactcgtcctggcgatttacaaacaggcacggctcaccttcacactccagcacgctacatggaacttcgatgtcgcttaacgcctggcttagtttatacatcacgctccatgcattatcaccatccgggctaagcaatttaagcgccaccaggctgttgtcaccgcacggtccattttgcggaatcggttcaaccttgctacctgcgaaaccagcagaccagcgatagttctgcggcagtcgatggacgatactgagttgtaaactagtcacttattttccccggaagcacattcacttcacaatttgtttacatcaattttaacacatcatcaacaatccgtctttatacagatcgtaaagattgatgcctcgcctgcgtggcctctatggctctgatttaagtaatatctgcgggcgtggtcacgtttgcggggctatatgtacccgtttctgcgatctaactcaacctttttaactacaatgatgtgactttttacataaattgattttacataaaataaacatatatcgggggaatgatagatttgtggttgacatgcatcaacaaaggaagccttttagcttcctcgttgtgcaatagatcaccgttttttcggccgactggcgtacagacagaagagaatggagctggttgcgcagaatgcaatactccaaatcatcggccatgcagagttaaaggtcgcaagagaaagcaatgcgccaacaattgcccctatgccaaaacggaaggttcctgccaggctagatgccgttcccgccatatggggaaactcatcaagaatgaccgccatcgcattggaactcaccatgctcacgcagcccacaaacgccgcaacgccaaccaccaggctccaaaatcccagccccagcagcgcactgatgaccatccacgctgccataataaattgtatccacaacccgctgcggaacatatttaacgcgccaatgcggcggacgaagcggctgttaaagatggtcatcacgaacagaaaaacaatgtttagcgcaaagtaataaccaaagttttccggcgcgacgtggttaatttcaatataaacaaacggtccggcgcttaagaaactgaacatcccggcaaagctgaaaccactggcaagcatgtagctcaggacacgtttatggcggaacagcgccgcaaagttaccaatagtggtacgaatgtgaaatggctgacgacgctccggtggtaaggtttctttaatcaggaagaaaatcattgcgctagccagaatcgccgctaatgccaggatccagaagatgtaatgccagctcagccacaccagcacccagccgccaactatcggtgccatcagcggtgcaatggttgtcaccagcatgacaaagctcatcatccggctgaactcttctttcgggtaaatatcgcgcatcagggcgttaatgaccacgctggccgcagccgcagccagcccgtggaagaaacgcatcacaatcagctgatcgatggtgtttgccaacgcacacgccaccgcggcggcggcaaacaccagcgtaccgccgagcaccaccggcttacgcccgaagctgtctgccatcggcccgtagattaactgccccaacgcaaagcccagaatataagtactgagggtcatctgcgtactgcccgccggtacgccaaactgcgcactaattaccggtagcgcgggcagatacatatcaatgctcagcggcatcaacatggccagcaggccaaggataaaaacaatagcaaagctgctatgctgtcgggtggtcacaacgggctcctgaaagtcattgaaaagttagacgacgctggcaatttcttcttcagttaacggacgatattcaccgggggctaaatcagcatccagcgtaataccgccaatacgttcacgatgcagctcaaccacgtggttacccacggcggcgaacatgcgtttcacctgatgataacgcccttcgctgatggtcagacgaacctgcgttggggtaatcacttccagcaccgcaggcttagtgagatctttttcgttatgcagctgcacgcctttagcaaattgctctgccgtatcgtcagctacaggactttccagtgtcaccagataggtcttctcgcaatgatggcgcggagaagtaatgcggtggctccactgaccatcatcagtcatcagcaccagaccggtggtatcaatatccaaccgccccgccgcatgcagtttccacgctaccggttcatcaagaaaatagagcaccgttgggtgatcagggtcgtccgtggagcaaacatagccctgaggcttattgagcatgaagtaacgtggaccgtgttgctgcgccagcgggttgccatcgtaagcgacatcatgttcaggaagcagtttgaacgctgcattacggacgatttcgccatcgacggtgacacgattgccgcggatttcacgcccggcaatagcacggctaacgccgagttgctgtgcgataaatttatcaagtcgcatgtgtgtgattttgcctgtaaaaacggaggtcgggcattgacccgaaaatctgaactgttgtctgcccagtatagcggtctaataacatccctcaagggaaaaagatccatggcatactattagcagaataatctacctacgcgagaccatgatttttacacttcgcccatatcagcaagaagccgtggatgccacgctcaaccattttcgtcgtcataaaacccctgccgttatcgtgctgcccaccggcgcaggtaaaagcctggtgatagcggaactggcacggctggctcgtggtcgcgtgctggtgctggcacacgttaaagaactggtggcgcaaaaccatgcaaagtatcaggcgctggggctggaagccgatatttttgccgccgggctaaagcgcaaagagagccacggtaaagtggtatttggcagcgtgcagtctgtcgcccgtaatcttgatgcctttcagggtgaatttagcctgttgattgtcgatgaatgtcaccgtattggtgacgatgaagagagccagtatcagcaaatcctcactcacctgacaaaagtgaatccccacttacgcctgctggggctgactgccacgccttttcgattgggcaaaggctggatctaccagtttcattatcacggcatggtacgcggcgatgagaaagcccttttccgtgactgcatttatgagctgccgctgcgttatatgattaaacacggctatctgacgccgccagaacgactggatatgccagtagtgcaatacgatttcagccgcttgcaggcacagagtaacgggctgttcagcgaagccgatctcaaccgtgagctgaaaaaacaacaacgtattaccccgcacatcatcagccagattatggagtttgctgcaacgcgcaaaggggtgatgatttttgccgcgacggttgaacacgcaaaagagattgtgggattactgcctgccgaagatgcagcactgattactggcgacacccccggcgctgagcgcgatgtgttaattgaaaattttaaagcccagcgttttcgctatctggtcaacgtcgcggtactgaccaccggatttgacgccccgcacgtcgatcttatcgccattctgcgccctaccgaaagtgtgagtctttaccaacaaattgtcgggcgcggtctgcgtctcgctccgggcaagactgattgcttaattcttgattatgcgggtaatcctcacgatctctacgcgccggaagttggtacaccaaaaggcaaaagtgacaacgttccggtacaggttttctgccctgcctgcggttttgccaacaccttttgggggaaaacgaccgccgacgggacattgattgaacactttggtcgtcgctgtcagggatggtttgaagatgacgacggtcatcgcgaacaatgtgacttccgtttccgttttaaaaattgcccgcaatgtaacgcggaaaacgatattgccgcccgccgctgccgcgaatgtgacaccgtactggttgatccggacgatatgttaaaagcggcgctacgactgaaagacgcgctggtattacgctgtagcggcatgtctttgcaacatgggcacgacgagaaaggcgaatggttgaaaatcacctattacgatgaagacggcgcggatgtgagtgagcgtttccgtctgcaaacacctgcccagcgtaccgccttcgagcagctttttatccgcccgcatacgcgcacaccgggcatcccgctgcgctggatcaccgccgccgatatcctcgcccagcaagccttattgcgacacccggattttgtcgtcgcccgcatgaaaggccagtactggcaggtgcgtgaaaaagtgttcgattacgaaggtcgttttcgtctggcgcacgaattacgcggttaatggtagttttgattgatgtataaggcgattgagtatagaatctcgcccgcttttgcatacgcaaagcagatcacttacctgttgctgggtcgcctgtagcaggattaatttaagagagaaagaaatgtttactatcaacgcagaagtacgtaaagagcagggtaagggtgcgagccgccgcctgcgtgccgctaacaagttcccggcaatcatctacggtggcaaagaagcgccgctggctatcgagctggatcacgacaaagtcatgaacatgcaagctaaagctgaattctacagcgaagttctgaccatcgttgttgacggtaaagaaatcaaagttaaagctcaggacgtacagcgtcacccgtacaaaccgaagctgcagcacatcgacttcgttcgcgcttaattgctgaataagttgtaaaaaaccccgctccggcggggttttttgtatctgcagattatgcctgattacggtattgctattttttgcaggccagataaggcgttcacgccgcatctggcattcagaacacaaaaccgattaattgccgccagacgtccggcgctgcaattggtcgcgcaaattcggcggcgtgcctttaatggtcaaggtatcggttgctggatcccagaagatgcgttcacctaacagcatcgcatcaaagttaatagtcaagccaccgccgctaccggcaaacttcgtcaactgacgcagtgtgctacggtctgccgggaagctctcttccagttcgtagcctttttcagccgcaaactccgtgaagctcacttcgcttacgcctgccagctctttgctcaggcttttcagttcgatctcttcgcctgcctgcagctgctcattacagtagctataaacctgctggcgcacgttctgtcgctctgctttatccagttgtgcttcggcagtgaaatcatcaaccgcttgcaacagcccacggttttgcgctttcgcgtttaacccttcgctggccccgaggaaatccataaagaaatccgccactttgcgccctactcgccctttcaggaaagtgagatagcgggtggactctggattggtttcccattcggttaaatcgatacgcgcaacaatatccgcatgattgatatcaagataatgggttgggttgatgtcgagattttcgttaacgcgcatactgctcaggttgctcagaactgccaccagcaaatactccaccgccagatagcgatagtggcaaaacagcacgaatccaccgtcagcaaaaggatatttcgctaattcgtcacgcaggcggccggttgccgcgcggctaaatgccaggaagtcctcttcgccctgacgctgtaagcgcagcgtctgcgccagttcactctcttcgctaaacaagccgtaagctttatttttggcgctatagacccgatgcagttctgccaccatctcaacgacggtttctgtcggttccagcaaactatcgcgcaacaccagctcaaggttctgctcatcacgcttgataagctggtgcagagcaatctggttgatatccagactcatgataaactctcctttaagaccgggcggtattcaaccaccgccggttaagcgacgcaataaaagatggcggtcattttacagaaggcagcgtaacgagaatgatttaacgcataaaaaagcagaaaaaaaaccgttgctacggtaatatgttgccctttcatcaactaactgatttcgatttatgccacaaatttcccgctacagtgatgaacaggttgaacaattgctcgcagagctgctcaacgtactggaaaaacataaggctccgaccgacctttccctgatggtgttaggcaacatggtcactaaccttatcaacaccagcattgccccggcccaacgccaggcaattgccaactcttttgcccgcgccttacagtcctctatcaacgaagacaaagcgcactaagggaaacagataacaggttatggtaactcatcgtcagcgctaccgtgaaaaagtctcccagatggtcagttgggggcactggtttgcactgttcaatattctgcttagcctcgtcattggcagccgttacctgtttatcgccgactggccgacaacgcttgctggtcgcatttattcctacgtaagcattatcggccatttcagcttcctggtgttcgccacctacttgctgatcctcttcccgctgacctttatcgtcggctcccagaggctgatgaggtttttgtccgtcattctggcaacggcgggaatgacgctattactgatcgatagcgaagtctttactcgtttccatctccatcttaatcccatcgtctggcaactggttatcaacccagacgaaaatgagatggcgcgcgactggcagctgatgttcatcagcgtgccggttattttattgcttgaactggtgtttgcgacgtggagctggcaaaagctgcgcagcctgacgcgtcgtcgacgcttcgcgcgcccgctggccgcattcttatttatcgcctttatcgccagccatgtggtgtatatctgggccgatgccaacttctatcgcccgatcaccatgcagcgcgctaacctgccgcttagctacccgatgacggcgcgacgttttcttgagaagcatggtctgcttgatgcgcaggagtatcaacgccgtcttattgagcaaggtaatccagacgccgtttccgttcagtatccgttaagcgaactgcgctatcgcgatatgggcaccgggcagaatgtgctgttgattactgtcgatggcctgaactacagtcgcttcgagaagcagatgcctgcgctggcaggttttgctgagcaaaatattagcttcacgcgccatatgagctccggcaacactacagacaacggcatctttggcctgttctatggcatcagcccgagctatatggacggcattctgagcacccgtacgcctgcggcattaattactgcgcttaatcagcaaggctatcagctggggttattcagtagtgatggctttaccagcccgctgtatcgccaggcattgttgagtgatttcagcatgccgagcgtacgcacccaatccgacgagcagaccgccacgcagtggatcaactggctgggacgctacgcacaagaagataaccgctggttcagctgggtttctttcaatggtactaacattgacgacagcaatcagcaggcatttgcacggaaatatagccgggcggcaggcaatgtcgatgaccagatcaaccgcgtgctcaatgcactgcgtgattctggcaaactggacaatacggtggtgattatcactgccggtcggggtattccactgagcgaagaggaagaaacctttgactggtcccacggtcatctgcaggtgccattagtgattcactggccaggcacgccggcgcagcgtattaatgctctgactgatcataccgatctgatgacgacgctgatgcaacgcctgctacatgtcagcacacctgccagcgaatatagccaaggtcaggatttgttcaaccctcaacgccgtcattactgggttaccgcagcggataacgatacgctggcaattaccaccccgaaaaagacgctggtactgaacaataacggtaaataccgcacttacaacttacgtggtgaaagagtgaaagatgaaaaaccacagttaagtttgttattgcaagtgctgacagacgagaagcgttttatcgctaactgattaattataaatcagttagcgaaatatcttacttgcaatcggtgtggaaaacggtagtattagcagccacgagtcggcacgtagcgcagcctggtagcgcaccgtcatggggtgtcgggggtcggaggttcaaatcctctcgtgccgaccaaaaatcccaagaaaaaaccaacccttacggttggtttttttatatctgcaattaattcgataaacagaccgtgacacatcacagcctgtttattttctgttatcagaacgtcctgagctttcatcctatgaaattaattgctgttaaaagcattgggtacagaaaatacccatagctccatacccggagtcagtttttaaaaactgtttaaagaaatgcacaagtattgtgattgattttttagttgtttttcttgatgagaagctgatgcaaaattccgtctttataatgaaaatgatgccaaagcgaacgacaaggttgtagttttcactacatgtccatacataaaatggggtaacattcacgcgcctggtagcgttaccaacgctacgctcaaacataatgattctaataaaacctcaggagactactatgcctgaagcaacaccttttcaggtgatgattgtggatgatcatccacttatgcgacgcggtgttcgtcagttactggagcttgatcctggctctgaagtggtcgccgaagcgggcgacggcgcgagcgctatcgatctggcgaatagactggatatcgacgtgatcttgctggatctcaatatgaaaggtatgagtggcctggatactctcaatgccttgcgcagggatggcgttaccgcgcaaattattatcctgaccgtatccgatgcctccagcgatgtctttgcgctgatagacgcaggcgcagacggttatctgttgaaagacagcgacccggaagtattgctggaagcgattcgtgccggagcgaaaggcagcaaagtctttagcgaacgcgtcaatcagtacttacgtgaacgtgaaatgtttggcgcggaagaagatcccttcagcgtgctgacggagcgcgagctggatgttctgcacgagctggcacaggggctgagtaataaacagattgccagcgtgttgaatatttccgagcagacagtaaaagtacatattcgcaatctgctgcgtaaactcaatgtccgcagtcgcgtggcggccaccattctgttcctgcaacaacgcggggcacaataaaaatagcccgatggatttatcatcgggctgagatttatgacaaacgcaaaactgcctgatgcgctacgcttatcaggcctacgtggatcgatcaatttattgaatttacacaattttgtaggccggataaggcgttcacgccgcatccggcataaactaagcgcactttgtcaacagtctagcccgatggcatcaccatcgggcctctttttatttactctcctgcgggctcaaatgttgcatcgcctgcgcgatactacgttcaatcaccgcacggcgagtatcgttggcaggtaagagtttcaacatcatctcccacgcggcaacggcttcgccaaatcgctgctgctcaaaggcattaaacgcatacatgcttagcacacggatattgctatggtccgttctcaccagctgacgtagcagttcaccgccgaggcggttgtcgttgggatcagaactacgagtcaacgcttcagcgtatcccagtgcagcatcactgtttttcggatcgaggcgatacgcagtggcgtatgcatcggtggcgatactggcgttacccagcgccatgccaacgcggcccaacataatccagccttctatatctcccggatttttttgcagttgagtacgcatccccagcgcaagacggctcatctcttcttcgttgagcggatcggctttcggatccagcgccctgtccagcaacgccggagcctgtgccgtggcctgctgccagattttcacctgctgataattgccagtctggtagtagctgacgccagccacaattaacgccaccacaatacccggcagataaacaacatatccggcacgcttaccttccggcacgctttgttcaggaaacgcttccggcaccacgcgtacccgacgccggctgcgggcgtatatgacccaaccgccaatgccaatagccactactggcagcacccacagcagcacggtcagcggcgttaacggcggatcgtaagtgacgaagttgccgtaacgcgccaccatataatcgacaatctcttttttacttttaccttcctgcatcagttcatacactttctgacgcaggtcggtggcaatcatgctgttggaatcggcaatgctgttgttctggcatttcgggcagcgcagttcttcagtgagctgacggaactgttgttcctgtgcttcatctttaaactgcaacacatcgatggtcgccagcgcactgccggagatcatcagcatcagcacgcccaataaaaacctcattgtgcggcctccttactgtatttctcccacagcggcttgatctcttcttcccagacgcgaggattcagatcgcccgcatggcgatagcgaatgatgccgttgccgtcaataagaaacgtttctggcgcgccatagacaccgagatccagccctaacatgccatcgccatcaaacaggcttagcgcgtaaggattgcccagctctttcagccagctgattgccttctggcgatcgtctttatagttcatgccgaccacgcggatgccctgcgcagaaagctgattcagatattgatgttccgcacggcaggtcggacaccaggtcgcccagacgttaagcagtactggtttgccctgagtcagcacatccgcctgataaaactgccccggattgtccagactttcgagacgaaacttcggcacaggcttgccaatgagcgcgctttccagattggtcggatcatccccttcggcattacgcgccagctgccacagcagcgccgcggcaatcgccaggaagataatcaacggaattaacaatactttgcgcttcatacggcctccggcgcagttttttgcggactcacgcgcttacgatagcgaggatcaaacagacacagcagtccgcccaacgccatcatcagcccgcccgcccaaatccagcgaacaaatggtttgtagtaaagacgcacggcccacgcgccgttttccagctcttcaccgagggccgcgtacaggtcacgcgtgatgccgccgtcaattgccgcttcggtcatcatgctcccggcagtgttgtaataacgtttttccgcatacagcaccgtttccggcttgccatcgcgcgttacgccgatagtcgccacaccgccacgccagttcgggccagtcacctctttgacatcacggaaggtgaagcgatattcatgaatatcgacgctatcgccggacttcatgcgcacatcacgctcaacgctatagttctggctaaaggcaatgccaacaattgtcactgccagcccaaggtgagccgccaccatcccccaataactgaaggtggttttcgtgccgcgactaatacgtagcgcagcttccgcaattgccagcaccgcaatccagcaggccattgccaggccgagcaccgtcatcgccacaactttgctttcgaacagccacggcaacagcaggctcagcaccagcgtagagatgaaggcgataatcaataaattgcggatcttacgcgggcgatcccgcccccagcgcaccagaggaccgacaccaagcagtagcgcaaacggcaccatcagccaggtaaacatggtgttgaagaacggttcgccaatgctaatactgcccagtcccagttgcttatgcaccaacggcagcagcgtccccagcaacaccaccagcatcgcagcgaccagcaaaacattgttcgctaacagcaaagattcccggctccacagcgcattgtttacgcgactgcgaactttgtgtccacgcgcggcaaacagcagcaggctaccgccaatcaccagcaccataaaggcgaggataaacataccgcgcgccggatcagacgcaaacgcgtgtacgcttaccagcacgccggaacgcacgaggaaagtccccaacagacacaagctgaaggcactgattgccagcagtaatgtccacgctttgaagctggcgcgttgttcagtgaccgccagactgtgcatcagcgcagtccccaccagccacggcataaagctggcgttttctaccggatcccagaaccaccagccaccccagccgagttcgtaataggcccatgcggaaccgagcacgatgccgagcgtcaggaagatccacgctgccagcgtccacggacgagtaaaacgcgcataagtgctgtccagacgcccgctcagcaaagaagcaatggcaaaagcaaacgccacgctgaaacccacgtaccccatataaagcagaggcggatggaagatcagccccggatcctgcaatagcgggttaagatcgcgaccttcaatcgggaagttcggcaacgtgcgagagaacgggttagaggtaaagagaatgaacagcaaaaagccgacactgaccatccccattatcgccagtacacgggccacaatatccagcggaatacgctgactaaaaatcgccaccgcaaaggtccagccgctcatcagcagcacccacagcagtaggctgccttcatgcgcgccccaggtagccgccacgcgataccacaccggaagctgggtattggagttgctggcaacataggtgacggtgaagtcgttgaccacgaaagcattgaccagcaccagaaatgcgccagccacagacataaacagcagccaggcaaacaagcgggaagacgccatcatgcgcgcatctccgcgcgccacgccccatagcggatacacggacagcagcagcgcaattcccagcgccaggcacagcagtccgttaccaatttctggcatcatgatgctgggtccttataaacttacgtcaacttgctgggtccttataaacactcgccgggcgacggtggttagcttccatcgctttctcaacttctggcggcgtatagttttcatcgtgtttcgccagcacttctttcgcgaggatatgattgcctttttccagttcgccctgcaccacaacgccctgcccttcacggaacagatccggcaaaatgccttcgtaagagacatccacactgccttcagcatcgtaaatggtgaaggtcactttcaggctattgggatcgcgctgcacactacccggcatcaccatcccgccaacgcgcagacgctgaccgacttccggcatttgctgagtttcacgcttgccgtagagaatttcccccggcgtataaaagagatcgatattgctgcgcagcgcatatagcaccagaccgatagtcagcgccagccctgccaacacggcacaggcaatccacaagcggtttttacggcgaatattcatgcagcctcctgctgttgcgcagcacgtaaacgcgcctcacgcgcccgctgttgcgccacgccacgcagaattgcgcgatgttgcatcacgctgtgcacgaccaaaaccaccagcggaataacggtcatcaccaccgccagccagacaaaaaaggcgtaaccgcccattgcgaaaaattcattccaggaagcaaatgcaggggtcatttacggcctcttttcagtatcagttcactcacccacggacggcgtttttccatcagcaaaatcaaattacgcatccgcatcagcgtcagcgtggcagacaggagcaggaagccaaaaatgctccagcgcagcgggctacgcatcgccggatcgatactttgctgcatccgcgtacttccctgatgcagggtgttccaccactccacggagtaatgaataatcggcagattcaccacgccaatcagcaccaggatacctgccgcacggcccgccagacggcggtcgtcgaaggcgtgccacagggcaatcacacccacatacaaaaacagcagcaccagttcagaagtcagacgtgcatcccatacccaccaggtgccccacatcggttttccccatgcagagccggtaaccagggcaataaaggtaaacacggcaccaatgggggccatcgccgccaccgccaggttggccattttcatctgccagacaaggccaataaacgctgccactgccatacttgcataaatgcccatgctccagatcgccgcaggcacatgcaggtagataatgcggtagctatttccctgctgataatcagccggagcaaagccgaatccccagatccagccgacggtaagcacgaccacactggcaattgccagccacggtataaaccagccacagatttgatacagccgtggtgggatcgccagttgatgcagtgttttccacatagtttcgataccagactcgaacaaaaatcagtaatccagcgttattgaatgctgattcgtaacgctgccgccgtcgcaaaaggacttaatgtcgcggtgcctgccagcaacgcgcctaaaattgccagatacccgtcaacgggcaaatgcatagaagccgcgtccatcgcggcggtggcaaagatgagtaatgggatagtcagcggtaacaccagtatgctgagcagcacaccaccgcgcttaagtcccactgtcagcgccacgcccggtgcaccgagaaagccaagcgtaggcgttcccagcagcagcgtcagcgccatcacttgccagccataaacatccattcccagtagcattgctaccagtgggctaaggatgagtaacggcagaccggttaccatccagtgcgccatcaccttcgccagcacaacggcgggcaagggtaacggcaacaacatcaattgttcaagactgccgtcctgcaaatcgtcacggaacagtcgttccagcgccagcaaggaactaagcagcgcagcaacccagataatgcccggtgcaatacgcgccagcagttgcggctccggaccgatactgagcggaaaaagggtaattacaatcaggaagaaccacagcgggttggcgatttcggcgctatggcgaaacgctacacgcagctcaagacggaaaatgcgccagaacatcatgcggccctcgtttgcgtcagactaatgcggcgaattttactttcagcaacgttgagcggctggtgggtagtcagaatcacaatccccccctgctccgtatgctgcgccatacgctgggtcagacgatcgacaccgttaacgtcaatcgcggtaaaaggctcgtcgaggatccataacgtggcacgggtcagccacagacgcgctaaagcgacgcggcgttgttgcccggcgctgagctgatttacaggaatatcttcgaatccggcaagcccggcctgcgccagggcttccagacattgtgcggtatcgccatcgcgatgataaaagtgcagattttctaacgccgtcagccgggttttgatccccggctgatggcctatccataacaggttttgatggtagctgtcgcgtacctgatgcaagggctgcccttgccagagaacctcgcctgcgtcagggcgagacaaccccgtcagcaaacggagaagcgttgtcttccccgcgccgttgctaccggtgatttgtacccactctcctgcgttcagcgtaaaactcaagccactaaataaggttcgttcatcccgctcacaaagtaactctctggcttcaagcatacccacgcaataaccctgttaaaaacctggctcgacttcacgcatatcgggcagcttgtgcgctatccctttatggcaatcaatacaggtttgcccatctttcaccgcctggtcatgcatcttcgcggcaacgcttttctgggcggttgtatccatatactcgaagttgtgacagttacggcactcctggctgttattgtccttcatgcgccgccactcattctgtgccatcgtcagacgatgagcttcaaatttctgcggcgtgtcaataacgccaaaaattttaccatacagctctttacttgctttgagcttgcgtatcatcttcggcacaaactcgtgcggaacgtgacaatccggacaggtcgcacggacgccgctacggttgttgtagtgcacggaatccatgtattcctgatacaccgtgttgcgcatttcgtggcagctaatgcagaactcttcggtattggctttttccatcccggtgttaaagccaccccagaagacgatgccgccaacaaaaccgatcaacagcagcgtccccagcgccagacggctgggggtacgccaccatttccacaggcgcttaatcagaccaggcttacggtcagaatttcccataataacctcttatttcccgtaacctttacttggggtaaaggtattccccacgattggcgcggtatcggcctgcggtacgtgacattgcagacagaaataacgacgcggagccacttccgcgcccactttgccgtcgctgtccataaagtgagtaggactgatacgcggcgcgccagtggtgcgatagctttcgacaccgtggcactgcaagcagcgattggtattggtcgttacctgataaccttcaacgctatgcgggatcattggcggctgattcacatagttcagcggcatccgatcctgctcttttggcatccgaatggccccttcctgtgtcccggatacttccgggctctggctaaaatcgacgccattagccgcccaaaccgcgccgcttaccaccagggccagcatcgccgtccattgacacagcgctttcttcaggtcatggcttttcatgatttcgctcccgaactccattatgtcaacttttcgctccgctactccatcgtgtagttattgtaaatacatcctcagaacagacatccacgcagcgaccgcacgtcatgcaatcgcggctggtgacctgcaccgggctttgttcatccagcaccggggcacgtagcacatgcggttccgggcaaacatgaaaacaatccatacagcggttacatttctgccgatcggtggccgcaacggtaatcacacctttgctacccagcacgccatacagcgcgccaaccggacaaatgtgcccgcaccagccgtgttcaacgaccagtagatcaaataaaaacagcgcgagaataagcagcgcgccgctgccgaagcccattaccaggctacgccccatcagagaaacggggttgatccattcccaaatgagcgtgccagttaaggcacttcccaccagaatgaccaccaacagcacgtagcgaatgtggcgagggatcgtcgcagactgattgaggtcaaagcgcctgcgtaaccagttcgctaagtcggtaatcgggttcagcgggcagacccagctgcaaaataatcgctttcccgccagggcgtagagcacggtgataatcaccgcaccggtcaacgccaccgtggcaggcagatgaccactggcaagactttgcagcgtcatcagcggatcggtcagcggaacggtgtcgaataacaggctactgctgtagttgccgtgcaagatccacacaccaaaccatggaccgctcaaaaacatccccagcacgaagaactgacaaaggcgacgtaacaccagccaacggtgactgcgccaccagccttttttctccagcgcctcgcgcccggcgtcacgtttacgatttgccattgttcccctccagccagccgttacttagcttttgccattgttcccctccagccagccgaagcggtaatggtgacctaactcccctttcgccagactcagcggtaacaccttgattgccggttgttccagcacgcatactttttcgcacttaccgcaaccggtacaggcgtcgctgtgaaccgtcggcagaaagcgggcgtgcttaccggtacgcgtgttgcgctccagctccagggtgatggcctcatcaattttcgggcattcgcgataacaaacatcgcagcgcagcccctgaaagttgagacagttttcctggtccaccagtaccgccagccccatccgcgcgtcgtcgatgctttcaatctcacgatccagcgcaccgcttgggcacactttggcgcacggaatgtcctcacacatttcgcaaggaatatcccgtgcgacaaaatatggcgtgcccgcgctcagaccagaggccagcgtcgccagttttaaggtgtcgtaagggcaagcctgaacacactgaccgcaacgcacacaggcactggcaaaggcgttctcgtttatggctccgggcgggcgcaaccgcacgccagatgcgcgtgcggtttgctgttgtaaccccagcgccacacccacggcagccagcccgcctgctgtgcgaacgacatcgcgcagaaagcggcggcgaccattttgaggtttcgcactccgggacataatggcttacaccttctccagtttgaccgcgcacttcttgaagtccgtctctttgctgagcggatcggtcgcatccagcgtcagtttgttaaccaactgtgcggcgtcgaagaacggcatgtacaccaggccctgtggcggacggttacgaccgcgcgtttcaacaatgctgatcacttcgccacggcgagaaaccactttcactttgtcgccacggcgcagatcgcgcgctttcgcatccagcgggtgaataaacaggaccgcttccgggaaggcgcggtgcagttctggtacacggcgagtcatactgccggtgtgccagtgctccagaacgcgtccggtagagagccacaggtcgtactcttcatccggtgcttccgccgccggttcgaatggcagtgcgaagatcaccgctttgccatccggtttaccgtagaacttatagccttcgcccgctttcacgtacgggtcgttaccttcgctgtaacgccactgcgtttctttaccgttcaccaccggccagcgcagaccgcgcgctttgtggtagtcatcgaacggtgccagatcgtgaccgtgaccgcgaccaaaccatgcgtactcttcgaacagccctttttgcagatagaagcccagctcgcgggattcatcgttcagctgatcttccgccagttcggataccgggaatttgctcacttccggtgtggcatacagcacttcgtacagcgttttgccacgcagttccggtttcttcgccagcagatcttccggccatacttcttcagttttgaagcggcgggagaactggactaactgccagagatcgcttttcgcttcgcccggtgcctgtacctgttgacgccagaactgagtacggcgttcggcgttaccgtaagcgccctctttctctacccacattgcggtcggcaggatcaagtcggcggccagcgcactgactgtcggatacggatcggagacgatgatgaagttgcgcggatcgcgccagcccggcatacgctcttcattgatgttcggcccggcctgcatgttgttggtacacatggtccagtaaacattcagtttgccgtctttcagcgcacggtcttgtgccaccgcgtgcagaccgattttcgccggaatggtgccgctcgggatattccacttcttctcgcagatatcacggtgtttctcgttggtcaccaccatgtccgcaggcagacggtgagcaaaggtgcccacttcacgcgcagtaccacacgcagaaggttgcccggtcagggagaacggaccgcaacccggctgggaaattttgccggtcagcaggtgcaggttgtagaccaggttgttagcccacacgccacgagtatgctggttgaagcccatcgtccagtaggagatgactttcttgttcggatcggcatacagctgcgccagttgttctaactggtctttcggcacgccggtcatttcggcagttttttccagcgtatactcggcaacgaaggctttgtaatcttcaaagctcatcggttcggaggcgtcagaacccggattcttcgctgctttttccagcggatgggtcggacgtaaaccgtagccgatgtccgtcgcccctttgcgcaggttaacgtgcttgctgaagaagtcctgatttatcgcattgttttgaatgatatagttggcgatgtagttcaggatcaccaggtcagattgcggcgtaaagatgatgccgttatccgccagctcgaagctacgatgctggtaggtagaaagcaccgccacggtgacgttctggttagagagacgacggttagtgatgcggctccagaggatcgggtgcatttccgccatgtttgcgccccacagcacaaacgcgtcagcctgctcgatgtcgtcatagcagcccatcggctcatccataccaaaggtacgcataaagccaactactgcgctcgccatacagtgacgcgcgttcgggtcgatgttgttgctacggaagcccgctttaaacagcttggacgcggcataaccttcccagatagtccactgaccagaaccgaacataccgatgctttccggccctttttctttcagggcggttttgaatttctcttccatcacatcgaaggcctgatcccaggtgattggggtaaattcgccttctttgtcatatttaccgtttttcatacgcagcagcggctgcgtcaaacggtctttaccgtacatgattttgggcaggaaatagcccttaatgcagttcaggccacggttaaccggtgcgtccgggtcgccctgacaggccaccacacgtccctgctgcgttccgaccagaacgccgcaaccagtaccgcagaaacggcacggcgctttatcccatttgatggcttcctgctgaccaacaacggcgcgggcaacgcccggcacgctgagaccggcagccgccgcagcggccgcaacggcgttagctttcataaagctacgacgactgagtttcatggtgtttcctcaccttgctcttcctgctggtgataaaccaggctcaccgccagcacgccctctacgttgcgtacactctcaatggtttggatcagcgtttcgctgtcttctgcttccaccaccacaatcaactgaccgctcggcgcgtcgctgacagcaacttcacagccgggaaaggcgttcagttgggtgctgatgtcactaattcgttcgcttttggcctgcacgaccaggctgcaaacttgccagttagtgtgcatggagatactccgcagttatggcacttaccggacagctggctgcacatgctccacatccgttgcaaagttggctattaagttgcggctggtagatcccggagagcgtcgggcgaaagataattgccattggctcacagctatcctgacagcggcggcattcaacactctgatacgccaggcacgcgtccccgatggtgaactgcaaatcccaggccctggtgtggcgcggagaaaataggctttcggggcaagcctgcgcgcaggcgtaacagaagctgcactcgttatttttgaaattaacgctcggatagccgcccgcgccgcgttgcagaatgttgttttcacaagcattaatacaggcgtcgcagcgggtgcaatgggtcagaaaatgagattcatcaccggaccagggcggacggataccgttactggctttgcgccagcgaccagtgagtatgccccgacgggatgcatcaatcttcacattgaccttccatcattaacgcgctctgaaaattgagagcgaccaaataaaccgcataattaataagccatttttatagccgctaagatattaaaggatgtgtcaaagatgcataccccgatcggggtaaaacctgtagcaggatcaaaagagtggcgggaagcgtggcaaaaacgggcttttgctcacatttcaaatggttataaatatatttatatagcgattgattcaccagagatatttctgctggtttgctctctcattagaatttaacactaaaagagcaggtaaaattgtctgaatgttctttaagttattcataaagcaaattaataaatctgatgaatatgttaaccttcagcgacatcatcggtgaaaacctataaatgaagaaggaaagcaaaaaaatgaagaccattctacctgcagtattgtttgccgctttcgctaccacttccgcctgggcggcagaaagcgtccagccactggaaaaaatcgcgccttatccacaagctgaaaaagggatgaagcgtcaggtgattcagttaaccccgcaagaagatgaatctaccctgaaagtagaactgttaatcggtcagacgctggaagtcgattgcaatttgcatcgtctcggcgggaagctggaaaacaaaacgctggaaggctggggctatgattattatgtctttgataaagtcagttccccggttagtacgatgatggcctgcccggatggcaagaaagagaagaaatttgtcaccgcgtatctgggcgatgctggaatgctgcgttacaacagcaagctgccgatcgtggtgtatacgccagacaatgtagatgtgaagtaccgcgtctggaaggcggaagagaaaattgacaacgcggtagttcgctaaactgccgtgaagtgcggcaccccgtaggtcagacaaggcggtcacgccgcatccgacatccaacgcccgagccggttgcctgatgcgacgctggcgcgtcttatcaggcctacaccgctgtgaagtgcggcaccccgtaggtcagacaaggcggtcacgccgcatccgacatccaacgcccgagccggttgcctgatgcgacgctggcgcgtcttatcaggcctacaccgctgtgaagtgctccaccccgtaggtcggataaggcggttacgccgcatccgacatctaacgcccaagccggttgcctgatgcgacgctggcgcgtcttatcaggcctacaccgctgtgaagtgctccaccccgtaggttggataaggcggttacgccgcatccgacatccaacgtccgagccggttgcctgatgcgacgctggcgcgtcttatcaggcctacaccgctgtgaagtgctccaccccgtaggtcggataaggcggttacgccgcatccgacatctaacgcccaagccggttgcctgatgcgacgctggcgcgtcttatcaggcctacaccgctgtgaagtgctccaccccgtaggttggataaggcggttacgccgcatccaacatctaacgcccgagccggttgcctgatgcgacgctggcgcgtcttatcagcatacgccacatccggcataccatgccggatgtggcgtatcattacaacgcaatatccgccacttctttttgaacgggttgcggtttcaactgcggtttcggcgtactatctgctgcctgcggcttgtcgtagttcaaccccagcacttcgctggtgtactgcaactcgcgttctgttgccgctacatcaccgttcagcttgcgtccataagacggaacgatcgctttcaacgtagcctgccattgcgggctggaaacacgatcgccaaatactttttccagcagattcaacataatcggcgcggcggtactcgcccctgggcttgcccccaggagcgcggcaatggttccttgctggtcactgacgacttcagtacccagacgcagtacgccacctttctcggcatcacgcttgataatctgcacgcgctgccccgcttgccacaaacgccagtcctcttttttcgcctgcggatagtactctttcaacgcttcaaaacgatcctcttcactcaacatcacctgactcaccagatatttcaccagatcgaaattatccagcccgacgtgcatcatcggcatcacgttagaggtggtggtggaactcattagatcccacaaactaccgtttttgaggaatttggtactgaaggtggcaaatggcccaaacagcactacgcgtttaccgtccagaacgcgggtatcgatatgcggaacgctcatcggtggtgcgccaacggatgctttaccgtaaaccttcgccagatggtgattaaccacgtccgggttttcgctaacaaggaactgtccgcccaccgggaaaccggcgtagtctttcgcttccggaatcccgctttcctgtaacagcttcagcgccgcaccgcccgcgccgataaagacaaatttggcacgaatgttctgtgcagtgccatttttcagatcggcaacggtaacggtccaggtgttatcgtcattacgctttagggcgcggacttcgctgctgagttgcaggctgaagttagatttcttctgcaaggaagcaattaactggcgggtgatctcgccgtagttcacatcggtaccaatttccgtacgcgtggctgccactttctgttgcggatcgcgcccttccatcactaacggtgcccactctttgatctgcgcgtgatcttcagagtaacgcataccgcgaaacaggctgctttgttgcaacgcggcgtaacgggcgcgcaggaaattgacgttatcctcgccccagacaaagctcatatgcggaacggtattgataaaactacgcggagtacgcagcacgccgcgctcaacctggtgcgcccagaactggcgggaaatctgaaatgcttcgttaatggcgactgctttttcaatactgatgctgccatcggcgttttgcggggtgtagttcagttccatcagtgcagaatgcccggttccggcgttattccagccgttgctactctcctgcgcgacaccctccaggcgctccaccatggtcatgctccattcaggctccagctcgcgtaaataggtccccaacgtggcgctcataatgccgccgccaatcaacagtacatcagtttcctgctcctcggacgctttcgcttttgccgccatgctaacggcattaagccccacggccatgctgaagagcatggcagtcacttttttcatcttgttaatgccttacttttagtcgctttattgcaggtgagatttgcgcggcatcaacggtaacacttaagtaacaacatttaaataatgtttataaattatattctaattttagaaacattataatttcgttgattaattatagggttattagaaatgaagggatttttagcatattgacctgacggcagcagtccgccaggtcagcgtcgtaatattatgccgtccgggcaacggcatcacggctagcggcatcgcgctcttcgcccgtcagctcgctaagttgcccattgcgcatttccagcaggcggtcggcgtggataaagtaatgatcatcatgactgatagcgaaaatagttttacccatctcctgcatcagcggcagcaacacctgataaaactcacgacggaagtgtggatcctgatccgccgcccattcatccagcaggataatatcgcgttcttctgccagcgccagcaacagcgccacgcgttttttctgccctttacttaacttcaggttaacaatacgcccgttgcttaactcaagcttatgagccattttcagctgcgccagccacttctcaaccagttgcgggttagcgggtttaccctccggccccagcagttgatcaaacagccagacatcggtaaacactgcgctaaacagtttgcgataatcttccggttgttcgccgctgacaggtttgccatccagcaagatttcgccgctttgtggctgatacaagcccgtcaacaacatcgccagcgtgctttttccgctaccgttgccgccaatcagaaacagcagctcgccacgtttgatggtgagattaatcggaccaacggaaaacgcgttatcctgataagcaaacgtcacgttacgcagctccagcgtttgccagttgggaaacgcctgcgggcgcggaaactctgctttgaaaggcgcgagcgcgaatttgttcagcttgttaaacgccacctgcgccgtcagcagcgtcggcaatgcgccaaccgcgctaagcagcggcgtacgcaggaataaaagcgtcaagctataggtcgcggcaacgttggtatcagcccaaccgaggctgttcgccatccagaacaccaggccgattgcgcccagcatcatgatgttactccagttcacggcactaagatggaaggtgtctgcgcgaataatatggtggcgatactcttgcgcatcaggaatgtagaggttgttaaacacatactcggcgcgttcccggttcagagtcagctctttgcgcccttcaagtacagtttgaaaatccgtgtacagcttgtcttcggtttcacgcagggtcgccatatgtttgtacacccgcgccaccagcacaaaaccgccccagatggtgatcgccatccagatagccgttaccagcaacattttgccgctcagcatccacagatacgccgcactaccgatagtgagaatgatcccctgcaccagttccggcagacgcacaaaagcaatggtgatattgcgcacatcgctggttaaccccgccagcaagctggcgctaccgagttgttcaatgcgctcgacgtgagtatccagaatccgcttgataaattcactacgcagtcggtaaacgaagtgatgccccaaagtggtgagcgccagttggcttccgagagtgactgccatcaacagcagcaataatcccagaaactccggcaacaccagcagactggtatccgccgtttcgataaggcgctgattgataaaagcaattaagccaatgcctaatgccgcactggcgaggcttagcgccatcacactgataaatggccagcgatactgccgccagacaagtacaagaagttccatgcagaaaacccggacaatgaattacagcccgcagtttaaacatcttcgcgcgcacagcaataataattcttatttttattcttttttacctgcctgacggaatgtcaggttgtagcggcagtcgatggtgagtggatgaaaccccgctttcaacggttgaataccgtgataaaacagccggctttcaccgccccataccaccacatcgccatgttccaacaacaaacgtttgagcggatcatttcgtttcaggccgccaaattgaaaaatcgcgggtaagcccagagaaacagaaacaattggcgcgcgcagatccggttcgtctttatcctgatgcaggctcagtttcgcgccaggagcgtagcggttgataagacaagcatctggctggaaatctggatagcccgccgccgtagccgcacgttgacataaattatgaaaactctgtggcatggcgggccacggtttatttgtttgcggatcaatggggctatagagataaccttgccgatgggtcgtccagcccagatgcccacagttggtcatcgccacgctcatggtatatcccccgggggtgaccatctggcgaaacgggctctggctggcaacgtcattaatatcgcggatcagttgctccgcagcgttaaaagcaaaacgccgtaaaattaccgcaccagccgccagtggctcttgccacggttcagcatcggcaaacagatccaacattacctctcctcattttcagcttcgcggcgcagcagttgcgctttacggctcacgccccagcggtaaccggaaagtgtgccatcaccacggaccacccgatgacagggtattatgatagccagcttgttggcggcacaggcgctggcaacggcccgtaccgctttcggtttgccgatggcgttagccagttgctgataactgacggtttcaccgcaaggtatcgtgcgcagtgcctgccagacttgttgctgaaaagcagtgccgcgaatgtccagcggtaacgtcagcggcgtatcgcgttgattgaggctggcgatcacttcacgcacatgttgctgaaacatcagatcggcaggcgcgttgtcggcagcgggaaacatctgctgcaactcgctgattagtgtcgcgtcatcatcgcccagcaatatcgcgcaaatcccccgctcgctttctgccaccaggcaacgacccagctcacaatcagccagcgcgtaacgcaccgccagattttcgccaccgtgacggaattgtttagccgtcatgcccagcgtttcgtcagctttgcgatagtaactgctgctgtcggggaatccggcgttaagaatagacgtcgtcacgctctcccctttcgccaggctttcgcgcaaacggcgagcgcgccaggcctgttgccaggctttaggcgtcattccggtagtcgctttaaacaaccgatgtagatgaaatggactcatcgccacctggtcggctaaggcttccagcgttacaggcgtttcctgttccagcagtcgacacgcgtgggtgattttatccaaccgatgttgctgggcattggctttttctggctgacaacgtttgcaggggcgaaagccagcggcgagtgcctcgctggcatttgcgtagaaggagacgttttcccgcaaagcatgtctggcgcggcaagacggacggcaaaagatgcctgtggtacgcacggcgaaaacgaattcgccgtcggcattcgggtcgcgggctaagacagattgccagcgttgatcgtcagttaagcatgtggcttttttcataatcagctccctggttaaggatagcctttaggctgcccggtcaccatcacgcaaaaaccaacaatcttgcgctttaatttttttcgctgacaaggaagcttttaaactgtggactcatccaggttttaaagctatcgccttctttggtgatcatataaaccgccagcccttcccggcgaacaacctctttagctttctccggcccgagtaccatcaagccagtatcccaggcatcggcttccagcgccgtcggagcaatcaccgtcacggataccagattgtgttcgatgggacgcccggtttgcggatcgataacatgggaaagacgtttgccgtccagttcgtaatagttacggtagctgccagaggtgctaatcccatgaccgttgatatccaccacagcctgaaccgcgttttctttatcggttggtttttgaatcgctacccgccacggcaggccttcaccgttcataccacggctgttcagcgcgccgcccacgctcaccagatagcgggaaatcccttcctgctccatcaagcgtgccaaatgatcggccgcatagccttcgccgacggtggagagatcgacatataaatccggcaggtctttttgcagatattgctgatggctctgattgatgaccgtcaggtgctgtaagccggttttggctttcatcgcatcgatctgttcctggctcggaatttgaaccggctgttgttccgggccaaagccccacagattcaccagcggcccgacggttatatccatcgcgccatcggtcttcgcgccaatgcgcaggctggtggtgacgatatcggccatcgcttcacttaccggccacgggcttaaactttggctgtcgttaaagcgcatcagcgcggaatcttttttataggtgctaagcagctgatcgtcggcgtccagttgggtctgaatcttttctttaagttcggcgctgcgtttggcgtcaatgcccgggatgctggcacgccagaaggtacccatagttttgccttcaagaacggtaacttcagtagcgtgggttttggcgggttgtggtttttgatcgcaaccaacaaagaagagcgcggcagccagcagtgccacgcgggtaaagcttatttccatacgtgattatcctcatgcgaacggtcgcaagagtacaccaaaaaactgagtttgtacgctgaaaacaatgaaaaaagggcccgcaggccctttgttcgatatcaatcgagattagaactggtaaaccagacccagagctacgatgttatcagtgttgatgccagcgtcacgagtgaactggttgtcgtccagcaggttgattttgtagtcaacgtaggtggacatgtttttgttgaagtagtaggtagcaccaacatcaacatatttcaggatatcttcgtcgtcgtagccacgacccaggtttttacctttagactgcaggtaagccagggacggacgcagaccgaagtcgaactggtactgagcaacagcttcgaagttctgtgctttgttcgcccaacccagggaacctacgcgagttgcgttgtaggtctgggtgtactgagcagccaggtagatgttgttagcgtcgtatttcagaccaccagtgtaggtttcagcacggtcgccgttaccgatgtaagcagcggtgttctgagcatcagtacgtttggagctggagatcgcaccaccgataccgaaaccttcgtaatcataagtgatagaaccgccgacgccgtcgccgttttgacgcagtgcgtcacgaccgttgttagttacgccactagtaaagccttcaccagatgggttgccgtttttaccctggtactgaacagcaaagttcaggccgtcaaccagaccgaagaagtcagtgttacggtaggtcgcgaagccgttaccacgctgctgcatgaagttgtcagaaccgtaggtgtcaccaccgaattctggcagtacgtcggtccaggaagttacgtcataaacaacgccgtagttacgaccgtagtcgaaagaacccacatcctggaatttcagacctgcgaatgccacacgggtccaggagttgttttcgttttcagcgctgttgccctggatctgatattcccactggccgtaaccggtcagctggtcagtaacctgagtttcacctttgaagccaagacgcatgtaggtctggtcgccatctacatctttgttgtcagagaaatagtgcaggccgtctactttaccgtacagatctaatttgttgccgtctttgttgtaaacttcagcagcgtttgctgcgcctgctaccagcagagctgggaccaggagggacagtactttaactttcatgttattaaccctctgttatatgcctttatttgcttttttatgccactgcatactgattaaccctcattaatcagtcggcaagtccattctccccaaaaatgcagaataatccaacacgaatatgatactaaaacttttaagatgtttcatttatcgctatagatgtttcaaaatgtaaatgcaagggaactttttaagattattgcggaatggcgaaataagcacctaacatcaagcaataataattcaaggttaaaatcaataacttattcttaagtatttgacagcactgaatgtcaaaacaaaaccttcactcgcaactagaataactcccgctatcatcattaactttatttattaccgtcattcatttctgaatgtctgtttacccctatttcaaccggatgcctcgcattcggttttttttacccttctttacacacttttcattattctgtgctaccacagaaaaactataacgcttgttaactatttcacaaataattaacatccgcataatttccagcaatctttgtttatttgcaattatttttgttgggctttttgtaggttatttgtacagcaaaatggcgcttgtacatctatttcccccaatgcaggatgataaatatcacgggagaatagagaatcatcaatcaggtaagagtctggaatttcacactgtaccctttatactgccctatcacttcgcgaagttttaacaggtcataaacacgaatgcgtcagaaagagacaacggccacgacccgctttagtctcctaccggggagcattacccgcttctttttactgttgatcattgtgttactggtgacgatgggtgtaatggtacaaagcgccgttaacgcctggctgaaagataaaagttaccagattgtcgacattacccatgctatccaaaagcgcgtcgataactggcgttacgtgacctggcagatctacgacaacattgccgcgacgacctccccctcctccggcgaaggtttacaagagacgcgcctgaaacaggatgtctactatctggagaaaccacgccgcaaaacggaagcgttaatctttggctctcacgacaacagtacgcttgagatgactcagcggatgtccacttatctggatacattgtggggcgcagaaaatgtaccgtggagcatgtattacctgaatggtcaggataacagtctggtgctgatcagtaccctaccccttaaagatctcacctccggatttaaagaaagcaccgtcagcgacattgttgatagtcgtcgtgcagagatgttgcaacaggccaacgccctcgatgaacgcgaaagcttttctaacatgcgccgcctggcctggcagaacggtcattactttacattgcgtactacctttaaccagccaggacatctggcaacggtcgtggcttttgatctgccgattaatgatttgatcccaccgggtatgccgctggacagtttccgccttgagccagacgcgacggcaacgggaaacaatgataatgagaaagaagggacggatagcgtcagtatccactttaacagtacgaagattgaaatctccagcgcactcaactctaccgatatgcgcctggtctggcaggttccttatggcaccttattgctggatacgttgcaaaacattctgctgccactgctgctgaacatcggtttgctggcgctggcgttatttggctataccacattccgccatttctccagccgcagtacagaaaacgtccccagcacggcggtcaataacgaattgcgcattttacgggcaatcaatgaagagatagtcagtctgctgccgctcggcctgctggttcacgatcaggaaagcaaccgcactgtcataagtaacaaaattgccgatcatttgctgccgcatttgaatctgcaaaacatcaccaccatggcggaacagcatcaggggattattcaggcgacgatcaataacgagctgtatgagatccgcatgttccgcagccaggtcgcgccgcgcacacaaattttcattattcgcgatcaggatcgcgaagtgctggtaaacaagaaactcaagcaggcgcagcgtctgtatgagaaaaaccagcaggggcggatgatctttatgaaaaacattggcgatgcgctgaaagaacccgcacagtccctggcggagagcgcggctaaactcaacgccccggaaagcaaacaactggcgaatcaggcagatgtgctggtgcggctggttgatgaaatacagttagcgaacatgcttgcggatgatagctggaaaagtgagacggtgctgttctccgtgcaggatttaattgatgaagttgtgcctagtgtgttgcctgccatcaagcgtaaaggtctgcaactgctgattaacaatcatctgaaagcacacgatatgcgccgcggcgatcgcgatgccttacgacgtattttgctgctactgatgcaatatgccgtgaccagtacgcaattgggaaaaatcacccttgaggttgatcaggatgagtcctccgaagaccgcctgacgttccgcattctggacacgggagaaggcgtaagtattcatgaaatggataatttgcacttcccgtttatcaaccagacccaaaacgatcgctatggcaaggcggacccgctggcattctggctgagcgatcaactggcacgtaaactgggcggtcatttaaacatcaaaacgcgggatgggcttggtacacgctactctgtgcatatcaaaatgctcgcagctgacccggaagttgaagaggaagaagagcgtttactggatgatgtctgcgtaatggtggatgttactagcgcagaaattcggaatattgtcactcgccagttagaaaattggggtgcaacctgtatcacacccgatgaaagattaattagtcaagattatgatatctttttaacggataatccgtctaatcttactgcctctggcttgcttttaagcgatgatgagtctggcgtacgggaaattgggcctggtcaattgtgcgtcaacttcaatatgagcaacgctatgcaggaagcggtcttacaattaattgaagtgcaactggcgcaggaagaggtgacagaaagccctctgggcggagatgaaaatgcgcaactccatgccagcggctattatgcgctctttgtagacacagtaccggatgatgttaagaggctgtatactgaagcagcaaccagtgactttgctgcgttagcccaaacggctcatcgtcttaaaggcgtatttgccatgctaaatctggtacccggcaagcagttatgtgaaacgctggaacatctgattcgtgagaaggatgttccaggaatagaaaaatacatcagcgacattgacagttatgtcaagagcttgctgtaacaaggtagcctattacatgaacaatatgaacgtaattattgccgatgaccatccgatagtcttgttcggtattcgcaaaagtcttgagcaaattgagtgggtgaatgttgtcggcgaatttgaagactctacagcactgatcaacaacctgccgaaactggatgcgcatgtgttgattaccgatctctccatgcctggcgataagtacggcgatggcattaccttaatcaagtacatcaagcgccatttcccaagcctgagcatcattgttctgactatgaacaacaacccggcgattcttagtgcggtattggatctggatatcgaagggatcgtgctgaaacaaggtgcaccgaccgatctgccgaaagctctcgccgcgctgcagaaagggaagaaatttaccccggaaagcgtttctcgcctgttggaaaaaatcagtgctggtggttacggtgacaagcgtctcagcccaaaagagagtgaagttctgcgcctgtttgcggaaggcttcctggtgaccgagatcgctaaaaagctgaaccgcagtattaaaaccatcagtagccagaagaaatctgcgatgatgaagctgggtgtcgagaacgatatcgccctgctgaattatctctctagtgtgaccttaagtccggcagataaagactaatcacctgtaggccagataagacgcgttagtgtcttatctggcatttgcaccgattgccggatgcggcgtaaacgccttatccggcctacgattcccattatttcaacaaattacattaaagtaggccagataagacgcgtcagcgtcgcatctggcatttgcactgaatgccggatgcggcgtaaacgccttatccgtcttagctatcccggcttttcctgaccctctcggcatataacgtcagcgtctgttttatcacatccagcgttaccggcttgctcaggcagctgtccataccggactccagacaccgctgtttctcttcagccaacgcattagcagttactccgattaccggcaacgtcagtcccaactgacgaatgcgttgcgtcaagcggtaaccatccatatttggcatgttgacgtcgctaagcacgatatcaatatgattcttgctaagtacattaagcgcatcgacgccatcattcgcggttttacattgatagcccaagcttcccaactgatctgccagcaaacgccggttaatcggatgatcatccacgaccagaatcatcatatcgtcattatcgctgaccgctttgtccgtactcggcagagcgttagcaggatcgtcgctctccatctcgatcaaataaatacgcgccaacaatgccggtagctcatgcggagcagccacactgtgtacccactcccctggcgctttctccagcggaataccaatatggcgacgacagaaggtcactaccgctctgccctgccattttttactcactacctcgtcagtgatcaacacatcttcgggagtcggttcctgcccttcgtatgttgtaacgacgatgccgctgcgctgcaaactggtttccaggaactgacagaggctcgcattgcggaccgccagccagcagcgtttaccactcaacccttccacgccttttttctgcgggtactgagcgccgtacaacggaatacgcacggtaaactggctgcccattcccggttcactatctacgctgatatcgccgtccatcatgctgatcagtttttcacaaatcgccagacccagaccggtcccctggaaattacgctgtacgcccgttccgacctggaagaagggatcaaacaagcgcaccacttctttcgccggtatccccacgccggtatcgcgaacacggatagagagataatcgccatccgcgcgaacatgcaaaactatacagccggtatcggtgaattttatggcgttactcaacaggttggagatgacctgctgtaaacgcatcgggtcgccatttaaggccactggcacatccggttcaataaagcagtacaagcctaactgcttgcgtaccaccagcggtaaatagttggcggtgatgtggttcatcacttcacgcggactaaactcacgcggttcgatcttcaactgttcgctttcaatcttgctgaaatcgagaatatcgctgataattttcaacaacaggctggaagagttgttcattgccgtcaccagccgatcgacgcctttcggtaactctttggtttgcaacagatccaggttaccgataatgccatacagcggcgttcgcagctcatgactgacggtggcaaggaacatgcttttactctggctcgcctgttccgctgcttgtgccatctcctgcaagctctcttccatcttcacgcggctagaaacatccaccagcacacaaatggccacgttttcattacgatagcggctatggacgaagctgatttgcagattggtattgttgctggtcaggacatcaacaaaattgacctgctgcccacagataatttgcgtcagtcgttggcggtcctcatgcgtaagcatattgagataggtatgcgccagttcgttacttaaaatattgacgccatcagcggtacgcaaaatgcagatacccactggcgcggaggcgacaatcttgcgattgaactgctcatgttcttccagtcgcagggcgtcgctttccgccggaatgaaaatacgtcgctcgtacatccgtgcgagagtaaacaatgcagctccggcaagcacattcagcaaaattgcgttaaggatcaacatgcgaatgcgttccagcaccttatcaaccggcacgctatacacgatgcttaggctactgggtggcagatttttcttcagcaccagctcccggaacccttccgtatagccaaaccaggagcgttcctgcatccagcgaggatcgcccttaattttactttctggtccggtaaggctaatcagggtatgaccattttcatcaagaatggtaacccccatcggcaacgtacccggtaagaaaaagttctccatccggatggtctgctcgacacccaaaagcgcctgcaaccggttcgccagataaactggcgtcaacgcgtaaaaatacccgacgccagggcgcggaccttcgctgatccagtagaggttactgccgctatcatcttgtggtgcatttcgatatttattgatgcgttcatgcaaagctttcaacgcggtatcgcgttccactggcatatcacgcagaccgaaattggccatgcagaggttatcgctgccgattaaaaatacccggtttagatcgtaagccgcagaaaaattatcgcgccagtagcgcataaaccacgccaaactctccagagaacctcgccaggtgttactcattgcggaacaatcggagtcggcaaacagcggttcaaacgcaggcacatccgcctgcgtttctcgtccacgcggggaaagcacaccgttttctgcgcttaagcgattttcggcgatgtacttcagctctttcatcacatcagaggtgcgttgaataaagcgctgagcctgatcggaactcagattaaattcctgacgaatttcgctttctcgctgatgtaacgcattaacgatgtaaaaaacggaactaaaagcaatcaacagccagagcactaacgccaatgctctgaacatgtagcggctggctttcagggttgtacgaaaagaagcaaggtatttcaaaggggcgaagctccgcctcaggtgaccgatggagtgtggttaaggtagcggtaaaagcgtgttaccgcaatgttctctcttctctggaatatgatacaccgccgagaaatcatcaccttaacctctgataatcgtcatataccggacaagactagtggatttcagcatgcattatatgaagtggatttatccacgccgcttacgcaatcaaatgatcctgatggcaatcctgatggtcattgtcccaacgcttactattggttatatcgtagaaacggaaggacgtagtgcagtcttatctgaaaaagagaaaaaactttctgccgtggtcaacctgcttaatcaggcactaggcgatcgctatgatctctacatcgacttaccacgtgaggagcgtatccgcgcattaaatgcagaacttgcccccattaccgaaaatatcactcacgccttccctggcatcggtgctggttattacaacaaaatgctggatgcgataatcacctacgcgcctagtgcgctatatcagaataatgtcggcgttaccattgccgcagatcaccctggtcgcgaagtgatgcgtacaaatacccctttagtttatagtggcaggcaggtgcgcggcgatattttgaatagtatgctccccattgagcgtaatggtgaaatcctcggctatatctgggccaatgaattaaccgaagatattcgccgccaggcctggaaaatggatgtgaggattatcattgtgctcaccgctggtttgctgataagcctgctgttgattgtccttttctcccgtcgcctgagcgccaatattgatatcatcaccgatggcctcagcactctggcacaaaatattcccactcgattaccacaattgcccggtgaaatggggcaaatcagtcagagtgttaataacctcgcccaggcactgcgtgaaacgcggacacttaacgatctgattattgaaaacgctgccgatggcgtcattgccattgaccgccagggtgatgtaaccaccatgaacccagcagcagaagttatcactggctatcaacgccatgaactggtagggcagccttactccatgttgttcgacaatactcagttctacagtccagtactggatacgctggaacatggcaccgaacatgtggcgctggagatcagttttccaggtcgtgaccgcaccattgaactcagtgtcactaccagtcgtattcataacacgcacggtgaaatgataggtgctttggtgattttctctgatttaactgcccgcaaagaaacccagcgccgcatggcgcaagcagaacgcctcgccacactgggtgagctgatggctggcgtcgcgcatgaagtacgtaatccgttaacggctattcgtggttatgtacagatcttgcgccaacaaaccagtgacccaatacatcaggaatatctgtccgtagtactcaaagaaatcgatagtattaacaaagttattcagcaattgctcgaatttagtcgtccacgccacagtcaatggcaacaagtcagcctcaatgcattggttgaagaaactctggtactggtacaaaccgccggcgtacaagcgcgggtcgacttcataagcgaactggataatgaattaagcccgattaacgccgatcgtgaactgctcaaacaggtactactgaatatcctgatcaatgccgtccaggctatcagcgcacgagggaaaattcgcattcaaacctggcaatacagcgacagtcaacaggccattagcatagaggacaacggctgtggcattgatctcagcctgcaaaaaaagatcttcgatccctttttcaccaccaaagccagtggaaccgggcttggtctggcgttaagtcaacgcatcattaatgcccatcagggtgatattcgcgtcgccagtttgccgggctacggcgcaaccttcacgcttattttaccgatcaacccgcagggaaatcagactgtatgactgctattaatcgcatccttattgtggatgatgaagataatgttcgccgtatgctgagcaccgcttttgcactacaaggattcgaaacacattgtgcgaacaacggacgcacagcattacacctgtttgccgatattcaccctgatgtggtgttgatggatatccgcatgccagagatggacggcatcaaggcactaaaggagatgcgcagccatgagacccggacacccgttattctgatgacggcctatgcggaagtggaaaccgccgtcgaagcgctacgctgcggagccttcgactatgttattaaaccgtttgatctcgatgagttgaatttaatcgttcagcgcgctttacaactccagagtatgaaaaaagagatccgtcatctgcaccaggcactgagcaccagctggcaatgggggcacattctcaccaacagcccggcgatgatggacatctgcaaagacaccgccaaaattgccctttctcaggccagcgtcttgattagcggtgaaagcggcaccgggaaagagttgattgccagagcgattcactacaatagccggcgggcaaaggggccgttcattaaagtcaactgcgcggcgctgccggaaagcttgctcgaaagtgaactgtttggtcatgaaaaaggtgcatttactggtgcacaaaccttgcgtcagggattatttgaacgagccaacgaaggtactctgctcctcgacgaaattggcgaaatgccgctggtactacaagccaaattactacgcattctacaggaacgggaatttgaacggattggcggccatcagaccataaaagttgatatccgcatcattgctgccaccaaccgcgacttgcaggcaatggtaaaagaaggcaccttccgtgaagatctcttttatcgccttaacgttattcatttaatactgccgcctctgcgcgatcgccgggaagatatttccctgttagctaatcactttttgcaaaaattcagtagtgagaatcagcgcgatattatcgacatcgatccgatggcaatgagtctgcttaccgcctggagttggccgggaaatattcgagagctttccaacgttattgaacgcgccgtcgtgatgaatagtggcccgatcattttttctgaggatcttccgccacagattcgtcagccagtctgtaatgctggcgaggtaaaaacagcccctgtcggtgagcgtaatttaaaagaggaaattaaacgcgtcgaaaaacgcatcattatggaagtgctggaacaacaagaaggaaaccgaacccgcactgctttaatgctgggcatcagtcgccgtgcattgatgtataaactccaggaatacggtatcgatccggcggatgtataacaccaaaacttgctatgcagaaatttgcacagtgcgcaattttctgcatagccgctcattctccttataaatccccatccaatttatcccttcatattcaattagttaaataactaaatccaataatctcattctggcactccccttgctattgcctgactgtacccacaacggtgtatgcaagagggataaaaaatgaaaacaaaattgatgacattacaagacgccaccggcttctttcgtgacggcatgaccatcatggtgggcggatttatggggattggcactccatcccgcctggttgaagcattactggaatctggtgttcgcgacctgacattgatagccaatgataccgcgtttgttgataccggcatcggtccgctcatcgtcaatggtcgagtccgcaaagtgattgctagtcatatcggcaccaacccggaaacaggtcggcgcatgatatctggtgagatggacgtcgttctggtgccgcaaggtacgctaatcgagcaaattcgctgtggtggagctggacttggtggttttctcaccccaacgggtgtcggcaccgtcgtagaggaaggcaaacagacactgacactcgacggtaaaacctggctgctcgaacgcccactgcgcgccgacctggcgctaattcgcgctcatcgttgcgacacacttggcaacctgacctatcaacttagcgcccgcaactttaaccccctgatagcccttgcggctgatatcacgctggtagagccagatgaactggtcgaaaccggcgagctgcaacctgaccatattgtcacccctggtgccgttatcgaccacatcatcgttagtcaggagagcaaataatggatgcgaaacaacgtattgcgcgccgtgtggcgcaagagcttcgtgatggtgacatcgttaacttagggatcggtttacccacaatggtcgccaattatttaccggagggtattcatatcactctgcaaagcgaaaacggcttcctcggtttaggcccggtcacgacagcgcatccagatctggtgaacgctggcgggcaaccgtgcggtgttttacccggtgcagccatgtttgatagcgccatgagttttgcgctaatccgtggcggtcatattgatgcctgcgtgctcggcggtttgcaagtagacgaagaagcaaacctcgcgaactgggtagtgcctgggaaaatggtgcccggtatgggtggcgcgatggatctggtgaccgggagccgcaaagtgatcatcgccatggaacattgcgccaaagatggtagtgcaaaaattttgcgccgctgcaccatgccactcactgcgcaacatgcggtgcatatgctggttactgaactggctgtctttcgttttattgacggcaaaatgtggctcaccgaaattgccgacgggtgtgatttagccaccgtgcgtgccaaaacagaagctcggtttgaagtcgccgccgatctgaatacgcaacggggtgatttatgattggtcgcataagccgttttatgacgcgttttgtcagccggtggcttcccgatccactgatctttgccatgttgctgacattgctaacattcgtgatcgcgctttggttaacaccacaaacgccgatcagcatggtgaaaatgtggggtgacggtttctggaacttgctggcgtttggtatgcagatggcgcttatcatcgttaccggtcatgcccttgccagctctgctccggtgaaaagtttgctgcgtactgccgcctccgccgcaaagacgcccgtacagggcgtcatgctggtcactttcttcggtagtgtcgcttgtgtcatcaactggggatttggtttggttgtcggcgcaatgtttgcccgtgaagtcgcccggcgagtccccggttctgattatccgttgctcattgcctgcgcctacattggttttctcacctggggtggcggcttctctggaagtatgcctctgttggctgcaacaccgggcaacccggttgagcatatcgccgggctgatcccggtgggcgatactctgttcagtggttttaacattttcatcactgtggcgttgattgtggtgatgccatttatcacccgcatgatgatgccaaaaccgtctgacgtggtgagtatcgatccaaaactactcatggaagaggctgattttcaaaagcagctaccgaaagatgccccaccatccgagcgactggaagaaagccgcattctgacgttgatcatcggcgcactcggtatcgcttaccttgcgatgtacttcagcgaacatggcttcaacatcaccatcaataccgtcaacctgatgtttatgattgcgggtctgctgctacataaaacgccaatggcttatatgcgtgctatcagcgcggcagcacgcagtactgccggtattctggtgcaattccccttctacgctgggatccaactgatgatggagcattccggtctgggcggactcattaccgaattcttcatcaatgttgcgaacaaagacaccttcccggtaatgaccttttttagttctgcactgattaacttcgccgttccgtctggcggcggtcactgggttattcagggacctttcgtgatacccgcagcccaggcgctgggcgctgatctcggtaaaagcgtaatggcgatcgcctacggcgagcaatggatgaacatggcacaaccattctgggcgctgccagcactggcaatcgccggactcggtgtccgcgacatcatgggctactgcatcactgccctgctcttctccggtgtcattttcgtcattggtttaacgctgttctgacggcacccctacaaacagaaggaatataaaatgaaaaattgtgtcatcgtcagtgcggtacgtactgctatcggtagttttaacggtagtctcgcttccaccagcgccatcgacctgggggcgacagtaattaaagccgccattgaacgtgcaaaaatcgatagtcaacacgttgatgaagtgattatgggtaacgtgttacaagccgggctggggcaaaatccggcgcgtcaggcactgttaaaaagcgggctggcagaaacggtgtgcggattcacggtcaataaagtatgtggtagcggtcttaaaagtgtggcgcttgccgcccaggccattcaggcaggtcaggcgcagagcattgtggcggggggtatggaaaatatgagtttagccccctacttactcgatgcaaaagcacgctctggttatcgtcttggagacggacaggtttatgacgtaatcctgcgcgatggcctgatgtgcgccacccatggttatcatatggggattaccgccgaaaacgtggctaaagagtacggaattacccgtgaaatgcaggatgaactggcgctacatagtcagcgtaaagcggcagccgcaattgagtccggtgcttttacagccgaaatcgtcccggtaaatgttgtcactcgaaagaaaaccttcgtcttcagtcaagacgaattcccgaaagcgaatagtacggctgaagcgttaggtgcattgcgcccggccttcgataaagcaggaacagtcaccgctgggaacgcgtctggtattaacgacggtgctgccgctctggtgattatggaagaatctgcggcgctggcagcaggccttacccccctggctcgcattaaaagttatgccagcggtggcgtgccccccgcattgatgggtatggggccagtacctgccacgcaaaaagcgttacaactggcggggctgcaactggcggatattgatctcattgaggctaatgaagcatttgctgcacagttccttgccgttgggaaaaacctgggctttgattctgagaaagtgaatgtcaacggcggggccatcgcgctcgggcatcctatcggtgccagtggtgctcgtattctggtcacactattacatgccatgcaggcacgcgataaaacgctggggctggcaacactgtgcattggcggcggtcagggaattgcgatggtgattgaacggttgaattaatcaataaaaacacccgatagcgaaagttatcgggtgttttcttgaacatcgacggcgaaggtaaccccattaatcaccagtcaaaacttttcaccagcgtcagctcgccagcattacgcatcggtacaataaatgtttcctgtttctcattgacgcttccttcatcggtgatcagcgtcagttgggcggtggttaattccgtttcgctgcgcccaccatagtagttgatatacacctgatagcgcccgtgaattggcgcgggcatggcgaaaatctcgggtccgtaccccgtcgtgacatccatatccagtgcaccactgtttttcagcacggtgttaccgtaccaggcgtgttcgccatcgggcgtaacaacgtgaaggtcgaggtcggtattgtccgtatcccagctgagaaccagccgtaaacgtgcacgaatcgttcctgtacccggcgtactgtaaaactgcattttttgtcggctttgcccatccgggctgatgacctgcacgctgttgctgccttcagtgaaaatataagggcgtgcaaaactaccatcggattcaattctctgcggcatactggcaccgttgaccaccagccggccctgctgaactttacccgccgcagcataattctttattttgccgcggatctgcgcactgatattttgatcatctgccatgttgacggagctcgccgggtaattgatgctttgactaaaactggcatcttcgccctctgccggatgccagccactgagcggtgcatcaatctcgacttcctgcacaccttcactgtgagcgacagggctaagcgccaccagtaacaacggaagaaaaatctttcgcatagcattagtccattaataattgtcgggtcagcgtttcgatatagttctcatcaagcccggtgggataaccatcaaaggccaggtgcagatactcatgggttaaatccagccgatcctgaagcgtaaagaagttacgaataaacagccgtttctgctgccgatcggtataggggaaaccactgactaaacggcaaaccgcaaacacgtctggttcgttgtaccccgtctcagcttgtaatatacgccgccactgcggcatttttttcgccagccaggctttcgctttgggtaataactggcaggtactgcgtggcgctccccagcggctaagactgttgtcgggataagcaaacgcgagtatctgatcgtaacgctctccctgccccgcctgggccgtggcttgccgccaggaaagtgtcccttcggtagcgcgactgccatgataatgaaccggatcgcctgcatagatgagatcctgcgtccaggcggtcatcgttcgcgcccccgtggtcgctgggctagcagaaacacgctgcgtggcgctgctgtcggggatggtcaggcaatcgccttcccgattggcgttttgctgtaaaaaagtgcgaatcgccacggtcatggctttcgctgcctcagggggcgtacttttcgcctcgcgatccagaactctggcaacgtactcttcacgatcgagatggctctgcaatttcagtttgcccttttcgctcagtaaggtcgtctcaccgtggctgacaaacgtaatgtggttaccattagtaaacgtcacacgatagcgcccattaagtacgccgggatttactgccgtcgtactcttttccgctgtgattttcttcagcggatagcgggcaaacagctccacctctacacattgcccactggcaacctgcgtcggcactggcaaaacccgattaagcaccgtcgcataacgggttagtaccgttttgctggtgccactgccagtaacccacagcggtgtaccatcggttaaccagccagcaaaaccaccctgacggatttcctgtttatcatcggcaaaccagctccaggttttcacccgtacccgactaccgagcatggatgcgacaccgattttcgcctcgtccagcaccacatccagtaagacttcctgagctttgttttgcgcgggtaacgtcgctaaactatcaagcaggcttttaaccgttacgctggtttctggcttcagcgtagtcagagacgctaaccacgcaggtgcctgacgctgttgccagtattgcccccacacatctgcgccaatatgcaaccgctgcggcgcaaaatagagcccacaggaacgtaccagcgcggtatcgcgcgttatgctctccccagcctgacaacaataaacctcttccggggagtttccgcgacactggtagggctgctccggttgatgggtatcctccagccaggcgtaaacatacagtttccacaaactccctaacggcgtggtgaggctgtcaggtaatgcactgactttggtcacgccactactgctcagctgatacagttgatcgtgctgcgcaccgcgcagcaccagttgtaacggcgtctcctccgcaagtgttggcagagtaaccaacgccaatagccagacgattcagcgccagttcacttatttcacctgcatcccggtccattcactccctgccgcaacactttgctgcgcaggtgcataggaacgcacataacgagcaggaggcagaacgaattgccctttttgcgagaagcgcagcaaatggcggaaagtgaccgttcccgtcagttctttcaccggcaccatataggccagttcgcccatttcatttcgcgctttttccagcaattgcccctgctgtttcgcggcgttgggtttattgaccgaaatgccccatgttgtgcgctcaacgtcggctcccggtggcagcggtacttccacctgaccgtagcgcagaactgcatcctgctcgctggtaagcgtgatttcatcgagatacagcgcatcgctgtcaatctcattgctggtcaccggttgcagaataaagctcatctcttcttcaccagggataagccgatacaactggcgttcaacggtcaccggaatgttactttgttgagccatttttgccggctcacgtcagcggacctgcacattttgcggcgataattcgtcaccaaaagagagaatgtccggcacgccctgaccaacccaacgccagtcttcgccccctccagttaacttatgtttagcccatgcgcccgcaggcgcaggcaaaacaactggaggcattgtcgccatatatttcgccagccagttcatggccagcgcgcgctcaatagtggattgctcagcggtcaaaccacttaaaatagcggccgtctgggtagcgtcgccaccgctattaagcagcacaaccgtgtgcgccagcggctgattgctgtttgccgctttatcccacgcatattgctgaacctgtggcatcaccgtggacttcaactgcgcttttttcagcaacgtcatggttaagacgtttgccaccgcatctgccagtggagactccggtgtatcgaggatcaggctatcattgatatcgcgggtgtcttcctcagagaaatcttcagttttagttccgcgccgggcgatagcttcatccaaccctttcaacaacgttttgcacggcaaattcatctcctgcgcccatgccagcaccagcgcccgatgcaataacggcatgttatctgcctgctccgcgtagctgtcgagcatatgctgccagtattccggttgttgcgttacgccgatcgcctggctggcctgccagtcggcgtaccatgcccatgccgtaaggaaggcgtcaccattgccatcttcaccccaccaggtaaagcgcgctccgggccccgccagttgcatcagccgcagacggttatcctgaatcatctgacgaatgtcgttagcggcggcactttgatgatcggcaagcgaacgccaggcgagactgagcgggatcagacggctaccggtgttgattacgccaccccacggttcatcgactaacgcatcaagattgttgcggaaaatctcctgcggcgtttcactactttgtagccggatattgctcgcctgctcgggcaacatcagcgcgttatcgccaccaccgagcatgacatttttctgctgttcaacgggccagctgttatccacaaaagacagttttgtgctaatgctgtcctgcacttgcccattttgttgcagttctgcacttaacaagccagattgctgaatattctgcgtcagcgaaatataattcgcccctttgtgcagcgtcagcgtctggcgcatctcagcgcctgcaaatttagtcaccagcgccaccggttcgttatcctgctgactgaagataaatagtcctgccgccggtttgtcgcccacgcgatacaccgttggcatactccacttcatgtagagatttttttccgaacgcagataagcacgcccctgcccgaccagcccgtcgccgttcatcccacgcgcggtgatacgccagcgggttaacgaatcaggcatcaggaacgtgaaatacgctttgccttgtttatcggttgtgagtgacggcatccatgccgcggtatccacctcttcacgccgtggacgttcaagcatttttactcgccgctcgctgcggttagttgcgccaggcgcaaccggctcgctggagagcgcctggtcgtagctgataaacgacagactggagctggtacgcacattgttacgccccagcggatagaaaaatttgccgatattcggcgcgatttctggttgcagcgcgtagatcatttcatcgaccacgcctaccgttagctgcgcagaaacaggtttacctttcagcgacgaggttaattcgacattgaccagttcaccaggctggtaatgggttttgtccgttttcacccggatatccagctggggaacggcaactttgatcccggcgttctgaaaactgtactgaccgttacgggtatacagcaccgaaaaagtgatgttaggcgcaaaggaattgctcactggaacccgggcttcatactgggtatcgtttaaacgttgtagcgttagccagtttgccggatgcgaaagcagcgactgctgttccacgcgatcgcgttccagcgtcaataatgcttcatcaattggctccggaaaggtaatcagcatcttcgcggtttcgcctggctggtacagcgttttatccgccacgatatctaccgtaccagtatgcgccgtgctgcccttaccgctgacggcatgacttaacccagcgagaattaagccgtctttatcgcgtaatgtcagattgtagttgccaggtttagcgaaattgacggtaaaggatttgccgcctgacggtagctctccgctatggctcgtgcggtcttcgagacgcaaccattcatacgtaacaggaacctgttttgaagattccagcgcggcataacggaacacaaccgactcgccgctattactgtattgtgcggcagtacttaatgagtaatgcgccagaccgcgttcaatgaggatctctttggtggtggtgacgcgatacgccgcgccgtcactggcggagacggttaacaaatagcggctcggtttatcggcggcggggagatttaacgccacatgaccgctggcgtcggacaccgtttcgctgccttccagcgacacggggaaacgtccggcataacgcaaatcgttaccgaccattgataattgctgagcgcgcaaacttaactgcacgcgggcattttttaccggctcgccatccgggtagagcagttgcagtttgccgctgaccgcttcgccagttttgaactcttttttggcgagagctaaaccaatctcgaaatgtggcttgatgtagtttgccacgcgaaaactgctgctatagacctgattgcggtaagcaagacgtaactcataacctccggctacgacattttctggcaggcggaaacttccctgcccgccattgcgcgcatccagcgtgacattgacggtttgcaacagactgccgttggcgtccagcaccgaaagcttcgccggggcgctgacgatgggggatgaatgcaacggatcgtggaactcgcggccgatcactttaacatcgacacgatcgcctgcgcgatatagcgggcgatcggtaaaaatatacaagcgggtgttgtagatttcgctttcgtagaagaagttctcggagacaaaaacgccgccttcagcatccttacccagaatgtatgaacgttctggcgatatatgttgtaactgcaaggtaccgctgtcatcggtcacaccgcgggtcatcacgccaagaccgtcagtccacaagatctctgagccgggcttcgcttcaccctgttttttacccgcggtccacaccagaagctctttgcctgacactttgctaagcgccacggtatcggaaacaaacaccaccgtcgtcgcccgatacccaccaaccatcgcctcgacgaggtacagtcccggctcttgttggccgagaggaatataaatgttacccggctgcggcgagatgaaattgctggatgcgccttccagttttaccccttgctgcggctcgaacggtttagcctgccatagtggataacggaactgtttcaccaggggatattttttcagcggggaaaactggttgttctgtacataacgggaaggtttaataatggcattgccgagctgtaattcgggtaacgcctgagtcacattctgccgtgactgagaagagaaagtacgctgcatcacgcggcgagatttgccgtaccagttatcccacagccaggttagcgtattgttcagcccgtcgcccagatattgcggttgcaccacaatgcgatgcaggtttttctgctggcgcaaaaatgccatcgggtcaggaatacgatacaggcgaacgtccacgccgccgtactcttccatctgatagcgccgataatcacgccccggcgcttccagtcgcactttcgcctcttcactgctgctaaaactgctgtcagcaagcaaaaagaatgttcccccggcaggcggcgcatagttgctggaaggaagcgaatcatcagcattagcaagccctgttcccacaagagacagggacaagcacgctgttatcgcgccagaaaatttaaacgataaatgccaatgaaattgggattggaatcgttgggtatccatcgggtgtccttccatgtcataagttgttgcagactgactgcgcgcattccgttgtcagttttcgtggcgcttccggtgtggtagatgacgtaacgccccatccagaccattaagtgctgggcatcgccctgatcgaaaaaaatcatatcgccaggcagcgcctggtttatgtcctggccaataaactggctgttgtactgaatcaaattaatcgcggtcacataggggccggttttcccgttcccctgattccagttttgcgccagttgacgctgttcaggtgttagcgtcatctctggcggcaaatactggctagataaaccgttactttttagccatttactgtcgtgaactttcagcgtctcgttcgccgcaaatcgcaccaggcccgcacaatcctgctgataccagcgtggacttggcccctggcggagctgttcttgtgcaatgcgtacaaaccaggcgcgaaacagcccggattgttcgacattcagcatttcgctatgggcaacaacacaacacagccagcaaatcagcgccagcagcccgtgcctcatagcggctgccaggttatgggtagccactgccaggcggcaccgggttccatctgggccagcttcatgacataacgcggttgttgagataaagcgtccagcttcggcattaataaagtttgtgcggcgttataaaaaaccggttcgagattcttcggcagactggtcaacgtttcgttacgcagcagtttcgctattccttgtggattgatatagagcggaacgatgccatcagtgggtattacatccaccattgccgggcgggttttattcagtgtttgcagcgcgttattaaccagcgtgtcatcgagggagaaaagcagcgttttgttttgcatcgccaggctcacacggaaaaaataatcgctcattaattgatcgggttgcgccgcctgcgctttcggatactggccgtatcgggaactcacttcgcgacgccagatttgcgcttcgccctgctgagtctggcttaccggcaaaacaccttctggcgctttgctttcgtgcgcaccaatattttgcgtaaacagtttccctggcaattgcgcctgttcggcagtgccatcaaactgaccgacaaacagcggggtttgcaatttactgtcttcataccagcacagccccgcggcaccgtctaacgccccattcagcttgtcgttttcctggctgatgtggctaagcatctcttcggcaataccgtgactatacggcaccgccacacagaagctggctccggcaggcatactgttccataccggcgtaaaatcgaaactggcatctacgctggcggattcatcatttaacgccacaaaactgtgccagccgtcgttacccatttcgaagcgtacgccagcaaaagaaggcattaaccgctggtagccaaaccccagccacctggcgctgactacgatgcgctggcgtactggcgttttttcggcagtacgctcttccaggccaaagcttgcttgccagcgttttttgccgctcaacaaatcacctgcgatcgccgtggcttcggtatcctgctgatcatctttaaacaacatatccgtgctggaaaacaccagcatcttgtcctgataagtcgcgaacatcagggcgttattgccgttatagcgcaactgataaacaggaacagtttcactatttatcttgatgctactgatttccgttttgcttaactggctgtcgctggtagcggcaaacaacaatggctccagcagtttgcttaaaccactgcgctggatcagcaccatataatgactaagatggccttgtttatcgtgccacagcgctgcctgcgcgggctgatctaagagactgctaaagagcttatctttcagcgtgagatcgtgttcatagacaatacgacgaatgctgccttcaatgcccagacgatcggcatgattctgataatagaaaacgaaatcttcgctcagaacatcgtggagaaacggaatggtgaggagatctttgggaagctggctcagagagtcgctgtcgagaaagaggtccggctcattgagatcgatttgcagattgttgtgcaccaccagcgggctcaacgttttttctggcccactgccagcatattgcaacgcccagacgccagcggaaagcagtgctattgcgccaaaacctacaagaccatagaaccgccagcctttcgccttttttcaccactcattgccacattccttgtgtatagccagccattttttacgggcacagccaaactttaccgtgccctaatacgacaaaagcccagactttgcagcctggacttttcaattcaaacaagggagatagctcccttttggcatgaagaagtaaaattattcttcttctggctcgtcgtcaacgtccacttccggagcgatttcatcgtccccttccgcggcactgccgtcgatggtatccagatcttcctcgtcaaccggttcagcaacacgttgcagacccactacgttttcatcttccgcagtacggatgaggatcacgccctgggtgttacggcccacgatgctgatttcgctaacgcgagtacgtaccagcgtaccggcatcggtgatcatcatgatctggtcgcagtcatctacctgtaccgcgccaacaactaaaccgttacgttcggtaaccttgatggagataacccctttcgtcgcacggctcttggttgggtattccgccactgcggtacgtttaccgtaaccgttttgcgttgcggtgaggattgcgccatcgccacgaggcacgatcagagagacgactttatcgccttcacctaagcgaataccgcgaacaccggtggtgttgcagcccatcgcacggacagaagactctttaaagcgcaccactttaccttcagcggagaacagcattacttcgtcttcgccgctggtcaggtcaacgccgatcagctcatcgccgtcaaccagtttgatcgccactttaccggcggtacgcagacggttgaactcggtgaggacagttttcttcacggtaccgttagcggtcgccatgaagactttcacgccttcttcaaactcggtcactggcaggatcgcagtgatacgttcgtcctgctccagcggcagcaggttgacgatcggacgaccgcgcgcgccacgagtggcttccggcaactgataaactttcatgctatagacgcgaccacggctggagaagcacagaatatggtcgtgagtgttcgccaccagcagtcggtcgataaagtcttcttctttaatacgtgcggcagatttacctttcccgccacgacgctgcgcttcgtattcagaaagcggctgatacttaacgtagccctggtgagagagcgtcacgaccacatcttcctgggtgatcagatcttccaggttgatgtctgcgctgttggcggtgatttcagtacgacgtttgtcaccgaactgttcacgaaccagctccagctcttcacggatcacttccatcagacgatcggcgctaccaagaatacgcaacagttccgcgatctgatccagcagctctttgtattcgtcgagcagtttttcgtgctcaagaccggtcagtttctgcaaacgcagatccagaatcgcctgagcttgctgttcggtcaggtagtacagaccatcacgcacgccgaactctggctccagccattccggacgcgcagcatcgtcgccagcacgttcgagcatcgcggcaacgttgcccagctgccacggattagcaaccagcgcagttttcgcttctgcaggcgtcggcgcatgacggatcagttcgatgatcgggtcgatgttcgccagcgccacggctaatgcttcaaggatatgagcacgatcgcgagctttacgcagttcgaaaatagtacgacgggtcaccacttcacggcggtgacgaacaaacgccgcgatgatgtctttcaggttcatgatcttcggctgaccatggtgcaatgccaccatgttgataccgaaagaaacctgcaactgggtctgggagtagaggttgttgagcacaacttcaccgaccgcatcgcgtttcacttcaatcacgatgcgcataccgtctttgtcagactcgtcacgcagcgcgctgatgccttccacgcgtttttcttttaccagttccgcaatcttctcgatcaggcgcgctttgtttacctgatacggaatttcgtggacgataatggtttcacgaccggttttggcgtcaacttccacttctgcgcgagcgcggatatacaccttgccgcgaccggtacggtaagcttcttcaataccgcgacgaccgttaatgattgccgccgtcgggaagtccggccccgggatgtgttccatcagcccttcaatgctgatgtcttcatcatcaatatacgccagacaaccgttgatgacttccgtcaggttgtgcggcgggatgttggttgccatacctacggcgataccggaagaaccgttcaccagcaggttaggaattttggttggcatgacgtccggaattttttccgtgccgtcatagttatcaacgaaatcgaccgtctctttttcgagatcggccatcagttcatgggcaattttcgccagacggatttccgtataacgcattgccgccgcagagtcgccgtcgatagaaccgaagttaccctgaccgtctaccagcatataacgcaggctgaatggctgcgccatgcggacgatcgtgtcatagaccgcgctgtcaccatggggatggtatttaccgattacgtcaccaacgacacgggcagattttttataggctttgttccagtcattgcctagtacgttcatggcgtaaagtacgcgacggtgtaccggcttcaggccatctcggacatctggcagcgcacggccaacaatgacgctcatcgcataatccagataggagctcttcagctcttcctcaatgttgaccggtgtaatttctctcgcaaggtcgctcatctaaccgctatccctctactgtatcccggattcaaaggtcgcaaattataacacagccgcgcagtttgaggtaaacctatacgctttattcacatccaatgcctgatatactcgtttgtcttgccaattacggagtagaagtgccaatgaatgccgaaaaaagcccggtaaaccataacgtagaccacgaagagatcgctaaatttgaagccgtcgcctcccgctggtgggatctggaaggtgagttcaaaccgctgcaccgcattaacccgctgcgtctgggctatattgccgagcgtgctggcggtttatttggcaaaaaggtgctcgatgtcggttgtggcggcggcattctggccgagagtatggcgcgcgaaggcgcgacggtgaccggtctggatatgggctttgagccattgcaggtggcaaaactgcacgcactggaaagcggcattcaggtggattacgtgcaggaaaccgtggaagagcacgcggcaaaacatgccgggcagtatgatgtggtgacctgcatggagatgctggagcacgtccccgatccgcagagtgtggtcagagcctgtgcgcaactggtgaaaccaggcggcgatgtctttttcagcacacttaaccgcaacggcaagagttggctgatggcggtggttggtgcggaatatattttgcgcatggtgcccaaaggcacgcatgatgtgaagaagtttattaaaccggcagaattgctgggctgggtggatcagaccagtttaaaagagcggcatatcactgggctgcattacaacccgatcactaatacttttaaactcggccccggcgtggatgtgaactatatgctgcacacgcagaataagtgaggttgatgtttggccgcgccaatgcctgatgcgacgcttgccgcgtcttatcaggcctacaaatgctccccgtaggccggataaggcgtttacgccgcatccggcaaccgtgccgactagacagtgattaccatttcaccgtcatgctcaaaaaccctgccgtctgggcaaaatcatcactccctttctgccacgccacgctgccgcgcagggacactcgctgactgatattgcccgtgactcccacttttatttcaccccgttgcttcaccgcatcgtcactgatagtgctgccatcctcttcaatttccgtgctatggggatcgtgataataattcagatctaatgttggtatgacatgaacagcggtacgccattcgctgtgtaaacccagccgcgtctgaatatcatcaccctggctttgactcacgcgcgcacggttagcggcggtaaaatcatcctgctgcacgccctgataaatcacctgcgcctgcggttcaatcaccacaccacgccccggtaaccactgataccccgcctccaggctggcgataatcccgctgctgtggtaatgatctgtgccatcttcttgttcggaaacatcattgctaaaccacgcgtattgcagccagctatccagccaggccccttgcttctgattaccgtgctgaaaccagctacttgtcagcccaacggcataaccgtggttctggttatcggcgcgagttccggtcatattgctgcggctgtcgccctggttatcgctgtagccaccaacaatcccaagcatccactcgccatccgtgccccagcgcccgctaaacagatcgccgctaagttgcaccgtagaagtgtcttcatgttgagccagttgccccgctgctgtgtaatgataatctccgccgataacacgtaaattcagcgtctgaccatcgccacctgcgtgatcgcgtcgctccatcataaacgcctgatttgccgcccgcaggttattaagataaccgccaactttggcattcaacaccggctggtaagcaggcgtaggttccgggtcgggtgttggatcaggatccggcgtgggatcaggatcgggagtcgggtctggatcaggtgggcttggcggcgttacttcttggcttcgcagataccagtcgttgttatcttccaccagcgtgtagtcatacgctcccatattgacgtagccgctgcctgccagactgaactgcgcattgttttgaaactgcgtgggatcagctgcgaaatcaaccactttaatgcctgtgcttgtcggctcaccaatccctgtaatggagttaaccaccacagttgtgttgccagcagtattaccgttcatcaccaattgatcgcttacgctgtcatcgccgtttaattcgctatcgagcagtagcgtaccgccgccggtataatcaccgtttaccgtcagcgtatcgccagcgacgccattttgcaggctaaccgcaccggacgtattggtcagattgccattaaccgtcacgttggaaagataagtcaggctgtcagtttcaaggttggtattaagctcacctgtcaacgtcacaccatcggtggcattcaccagcgtcccatcgccgttaaatagactggcattaagggcgacggaagtatcctgcccggtcaggcgcaaaaccgtaccatcgctgatgtcgatagtgccgctggaaatagcatcaatactctgaatatcctgatccgcgccagtaacgaacgttgccccatcaccaacccacagactgctagcataaggaaggatatcagcaacatcacctttcagggtgccttcttcgacacgtaccgcgctctgcgttgtaccgctggcggtcagctccagtgtaccagcccccgttttagtcaatgtactaccctcatcctgatgctgcccgctgctgtcagccatcagtgcgccccactgcgtgtctacccccgcatcaactgccacttcaccgtcggcgcgcatttcaatatcacgtccgtggcctgccgcatcactacgcgtgtcaacgtcggaggtaatctccatcacgctttcttgttgcttatcggtaaagataacctggcggttatagtgggtatctccaagctggctgttgtcgctcaccatcagcgtaccggaggcgatttgtgttgtgcccaaataactattattgtttgccagacttacctgcccgtcgctcgcatcgaccaccacgtagacgccatctttcccgtcgccgccgatatgcaaattgtcgccacctgcaagatctaccacatcctgactgccgataaccgttccgctgctgccactgacttcaaggccatcgttgtaacttgtgccgctctgccaggtggagaaatcagagagatcgagcacaccgccgtttaacacgatgctctgcggatcgtcctggagagcggtaagatctgccgcgtcgccttccaggctaagcaccgcaccatcatcaacgactatatcgccggttagcgccatgctctgcgcccctgccagcacgtagctgccgttttgcgcaatggtgagctgaccagcaccttcgatgatgccagcaaaactgccctgattaacagtaacgttgccaccagcatcgatatttaaagtgccattctgaaagcccgtcaatgcgtgcacaaaagtttgttgggtgctgccaacgtttagctcagcctgattctgatactgatcaatactccctatcgtcagaccgtagcagtcttgcggatcgtcctggcaatgcgtatcgccgacattcatcagggagttgctgcggcccagggtaacttcaccgttttcaatctgcatctcaccagtaaagtcattgttatctgcattaagtaccagatcgccggaacctgttttggtgattaacccggtaccagcaatagagtcaacagctccgtcattctctgtattgccaataaccagcgtttttccgtcggcaatatcaaaggtaacttcacttaagccgagatacataaagccacccgccgcagaggaaggaccatctccatagcctgctgcgctattgttctcatcgactaacacgcctccgttctggctgtagctgtcatcaacagaaatatcaataagatagggagccgtcacgctattggtatatatcgccccgccataaccttcggcagtgttatttgtaaaggcagtgttatttactatcgtataaccactaggatgcttgctgtcgctattattatcggtaacatcgattgccccgccatcgccatcactgtaacttgtacttgtatatgcctggttgttatcaaaaataacatcacttaaataaacgtcattattaatggtataaattgcgccacctttgccatcattagcgatgttattgcgaaacatggcgttagtgacacgtaaatcgacggcaccagtatcgttagtaccagaagaatagattgcgccaccatagccgcctgcgacgttaccggaaaaaataacatcagtaagattcagcgtactgttttctttagcaaatatggccccgccgttattatattctcctgtaacggtgttattggcaaacagagtcattccagtttcattttctggtaatagactaaattccgctccttgttgcaaaaatacggccccaccgctggcgttattggtcatatcgctaaaaaccagccattgcccatcagcgatactccagtcctgcgtaatgccactaaggctttgcctgctggcctgacaactcgctttgacatcatatccctggcaactatcagtgaccgccgcgacaccgttagcagagaaaagagatgcaatcatactcgggagtaaagataaatactccttgcgtagaaagataatccgcatattaatctaaccatcattttctataagacggcgtatttaatcgcattatacgatatggaatatctttcttttgtaaattgttcaacccggtgcaatggctattttgttattatttgatgaataatatcagtgcgtcataattcaagttaataaccttcagggatatcagttatatttaaactaaattaaagtcatgaataattttcttataatataaggtaaattaacaaaatggcttagcatttaacaataaccgaatagaaaacaaccatttcgccatcaacaatctcttacattcgcttatatattgaccacaactgatacatcagattatgtgatgactcgtgcttagatcaatttttgcaatcattagcaaaaagattaataagccatctatatcaatttatctaacctattatgccgttcaagaaatcgccgaacagttatttttaacaaatttttctcttcccattgactttcccggacaccttgtctgacctaaggtgcgcgaaagccactttttccttcctgagttatccacaaagttatgcacttgcaagagggtcattttcacactatcttgcagtgaatcccaaacataccccctatatatagtgttctaagcagcttcccgtactacaggtagtctgcatgaaactattgcggaaagaattccaaaaacaggtacgacatacatgaatcagaatctgctggtgacaaagcgcgacggtagcacagagcgcatcaatctcgacaaaatccatcgcgttctggattgggcggcagaaggactgcataacgttagcatttcccaggtcgagctgcgctcccacattcagttttatgacggtatcaagacctctgacatccacgaaaccattatcaaggctgccgcagacctgatctcccgtgatgcgccggattatcagtatctcgccgcgcgcctggcgatcttccacctgcgtaaaaaagcctacggccagtttgagccgcctgcgctgtacgaccacgtggtgaaaatggtcgagatgggcaaatacgataatcatctgctggaagactacacggaagaagagttcaagcagatggacacctttatcgatcacgaccgtgatatgaccttctcttatgctgccgttaagcagctggaaggcaaatatctggtacagaaccgcgtgaccggcgaaatctatgagagcgcccagttcctttatattctagttgccgcgtgcttgttcagcaactacccgcgtgaaacgcgcctgcaatatgtgaagcgtttttacgacgcggtttccacatttaaaattagcctgccgacgccaatcatgtccggcgtgcgtaccccgactcgtcagttcagctcctgcgtactgatcgagtgcggtgacagcctggattccatcaacgccacctccagcgcgattgttaaatacgtttcccagcgtgccgggatcggcatcaacgccgggcgtattcgtgcgctgggtagcccgattcgcggtggtgaagcgttccataccggctgcattccgttctacaaacatttccagacagcggtgaaatcctgctctcagggcggtgtgcgcggcggtgcggcaacgctgttctacccgatgtggcatctggaagtggaaagcctgctggtgttgaaaaacaaccgtggtgtggaaggcaaccgcgtgcgtcatatggactacggggtacaaatcaacaaactgatgtatacccgtctgctgaaaggtgaagatatcaccctgttcagcccgtccgacgtaccggggctgtacgacgcgttcttcgccgatcaggaagagtttgaacgtctgtataccaaatatgagaaagacgacagcatccgcaagcagcgtgtgaaagccgttgagctgttcagcctgatgatgcaggaacgtgcgtctaccggtcgtatctatattcagaacgttgaccactgcaatacccatagcccgtttgatccggccatcgcgccagtgcgtcagtctaacctgtgcctggagatagccctgccgaccaaaccgctgaacgacgtcaacgacgagaacggtgaaatcgcgctgtgtacgctgtctgctttcaacctgggcgcaattaataacctggatgaactggaagagctggcaattctggcggttcgtgcacttgacgcgctgctggattatcaggattacccgatcccggccgccaaacgtggagcgatgggtcgtcgtacgctgggtattggtgtgatcaacttcgcttactacctggcgaagcacggtaaacgctactccgacggcagcgccaacaacctgacgcataaaaccttcgaagccattcagtattacctgctgaaagcctctaatgagctggcgaaagagcaaggcgcgtgcccgtggtttaacgaaaccacttacgcgaaagggatcctgccgatcgatacctataagaaagatctggataccatcgctaatgagccgctgcattacgactgggaagctctgcgtgagagtatcaaaacgcacggtctgcgtaactccacgctttctgctctgatgccgtccgagacttctagccagatctctaacgccactaacggtattgaaccgccgcgcggttacgtcagcatcaaagcgagcaaagacggtattttgcgccaggtggtgccggactacgagcacctgcacgacgcctatgagctgctgtgggaaatgccgggtaacgatggttatctgcaactggtgggtatcatgcagaaatttatcgatcagagcatctctgccaacaccaactacgatccgagtcgcttcccgagtggaaaagtgccgatgcagcagttgctgaaagacctgctcaccgcctacaaattcggggtcaaaacactgtattatcagaacacccgtgacggcgctgaagacgcacaagacgatctggtgccgagtatccaggacgatggctgcgaaagcggcgcatgtaagatctgatattgagatgccggatgcggcgtaaacgccttatccggcctacggctcggtttgtaggcctgataagacgcgccagcgtcgcatcaggctccgggtgccggatgcagcgtgaacgccttatccggcctacggctcggatttgtaggcctgataagacgcgccagcgtcgcatcaggcacaggatgcggcgtaaaatgccttatccggcattaaactcccaacaggacacactcatggcatataccacctttagtcagacgaaaaatgatcagctcaaagaaccgatgttctttggtcagccggtcaacgtggctcgctacgatcagcaaaaatatgacatcttcgaaaagctgatcgaaaagcagctctctttcttctggcgtccggaagaagttgacgtctcccgcgaccgtatagattaccaggcgctgccggagcacgaaaaacacatctttatcagcaacctgaaatatcagacgctgctggattccattcagggtcgtagcccgaacgtggcgctattgccgcttatttctattccggaactggaaacctgggtcgaaacctgggcgttcagtgaaacgattcattcccgttcctatactcatatcattcgtaatatcgttaacgatccgtctgttgtgtttgacgatatcgtcaccaacgagcagatccagaaacgtgcggaagggatctccagctattacgatgagctgatcgaaatgaccagctactggcatctgctgggcgaaggtacccacaccgttaacggtaaaactgtgaccgttagcctgcgcgagctgaagaaaaaactgtatctctgcctgatgagcgttaacgcgctggaagcgattcgtttctacgtcagctttgcttgttccttcgcatttgcagaacgcgaattgatggaaggcaacgccaaaattattcgcctgattgcccgcgacgaagccctgcacctgaccggcacccagcatatgctgaatctgctgcgcagcggcgcggacgatcctgagatggcggaaattgccgaagagtgtaagcaggagtgctatgacctgtttgttcaggcagctcaacaggagaaagactgggcggattatctgttccgcgacggtagcatgattggtctgaataaagacattctctgccagtacgttgaatacatcaccaatatccgtatgcaggcagtcggtttggatctgccgttccagacgcgctccaacccgatcccgtggatcaacacttggctggtgtctgataacgtgcaggttgctccgcaggaagtggaagtcagttcttatctggtcgggcagattgacagcgaagtggacaccgacgatttgagtaacttccagctctgatggcccgcgttaccctgcgcatcactggcacacaactgctgtgccaggatgaacacccttcccttctggcggcgctggaatcccacaatgtggcggttgagtaccagtgtcgcgaaggttactgcggctcctgtcgcacacgcctggttgcaggtcaagttgactggattgccgaaccgttagcctttattcagccgggggaaattttgccctgttgttgccgggcaaaaggcgatattgaaatcgagatgtgaattggttgtagtgccagatacaacgcttatgcgtcttatctggcctacaacgattacatggcgtagtaatacgctttcacctgctcccagtccgctttggggattggctccagatatttttccagctggcggaagtcatgattaatcgctttatcgcgacgcaagcggcgacgacttttctccaggtcaagaaaaccagcttctgcattaccttctgttttcacatagatatggcgaacataacaacagccatgctgacgattaatgctatgcattttcttaaacgccagcgccactgctttcaacatggcttgccgtacttcgtcagaataagggcttactgcatgctgggcataccagtcagcaatgctgatgaaccccgccatatcttcagtcaccagcaacgctcgccattcaccctcaattttcaccgcttcaccaaaaacgatcttcggcacgatgacaccggcccgttccagttctttaattaccgcaacctcacggacaatcgttggtcggccgaacggataacgtacggaatgaaacagatgatgcgtcatgcgctttacatacagctttttgccgttgcgctcgacgcattgcaccccgctcataccattacggcgatagttaggctcttcaacccagtcgccctctgttgcccaccagtgattaaattcgtcgtactttgcactaactgccataccctatcgcctgtcatttttattaacgacaatgactataggtggttacctgaggaaaatcttaatgaaacgtgtcgtattaatgaatttcttttgccactactagcttgacaccgcttttacccttcatttgcagcgcatagattccaccagccactaccactaatagtgcgcccagcagataaaatgtgaatttaatcaggcggatacagcgatgaattttattcgacagggattaggcatcgccttacaaccagagttaacgctgaaaagcattgcaggtgaattgtgttccgttcctctcgaaccaactttctatcgacagattagcttgctggctaaagaaaagccggtagaaggcagtccactgtttttactacaaatgtgcatggaacaattagtggcgattggaaaaatttgatatgagacaggatggcgcatgaacgccatcctgcagtaacattactctttattaagaaattttactgccttatcagggaaatcagtaaacagcccatttacacccgctttgttatacagagcatcatataactgattcacatcaggagtgtattcaggcagtttatcactccgcacggtataaggatgcactaccagtttattctgctgagcatcttgcaccatgccagtgagtttgatattacccggctggcttgtctcctcaatcaacatatggtaatccggaccaataccatctgcatattccgccacctgtttcatggcacccggcttaaacatccagtcgtagttgtaattaacccagcttccatccggctgtttctgctgcgtttcattccagtcggtataggcaatcagctgtaccagattgagctccatgcccattttgggttccagctcattcttaatacgcttcagctcatcagcatcaaaacattgcaaataaactttatcgtctttaccggtgtaaccatatttcttcagcacttccagcgtttttgccgcaatatccttcccttcctgatgatggaaccacggcgctttgatttctggataaataccgatatttttcccggtagagtgatttaacccctgaacaaattcaatctcttcttcaaaggtgtgcacccggaagtcggacttacccattgggaaacgccccggataagtctgcacttttttaccgttttcaatatcgaaaccttcggtaaatttcaagctcttaatttcatccagcgtgaaatctatcgcgtagtaacgaccgtctttgcgcgcccgatccgggaaacgatcggcaacatcagtaacacgatcgaggtaatggtcatgcagaacaaccagattgtcgtctttggtcatcaccaaatcctgttccagataatccgctccctgcgcatacgccatcgcttttgctggcagcgtatgctccggcaaatatccactggcaccgcgatgggcgatgactattttttcgttgctgtccgccgccattgcactgcttcccatgactatagtgctcatcatgatcgccatgctaaggtttttcagcgtcaatttcatgccattagcctccgttgcgttcttgcagtaattgttcatggcgacgtttttcgccaatcatcacaacaatcaacaagataaccgccagaatgctgccgccaatcattaccataaagccgccatcccagccgaagaagtccacggtgtagccaacaatcgcgctcgccgccacgctaccgcccaggtaaccaaacagcccggtaaagcccgctgccgtacctgccgcttttttcggtgccagttccagcgcatgcagaccgatcagcatcacaggaccgtagatcaggaagccgataacaatcatacaaatcatatcgacggttgggttacctgccgggttcatccagtaaacgatagtcgcgatggtcaccagtgtcataaagaaaacgccggttgccccacggttgccacggaagactttatcgttcatccagccgcacagcagagtgcccggaatacctgcatattcataaaggaagtaggcccaggaggatttatctagcgcgaaatgcttaacctctttcagataagtcggactccagtcgaggatgccgtaacgcagcagataaacgaacacgttggcgatggcgatataccacagcagtttgttcggcagtacgtactgcatgaagatttgcttcgccgtcagctcctgttccgctttttcgttatagtcgtccggataatcatttttgtactcttcgatcggcggcaagccacaggattgcggggtatcgcgcatcatcgcaaaggcgaataatgccaccagaatggcgcagaaagcaggcatatagagcgccgcatgccagtcattgaaccaggccatccccagcaggaacagcagcggcggaataccaccaccgacgttgtgcgcacagttccacacactcacaatgccgccacgttctttctggctccaccagtgcaccatagtacgaccacacggcggccaccccatcccctggaaccaaccgcagaggaacaacagtacaaacatcaccgcaatgctgctcgtcgcccatggcacaaagcccataaacaacatcactgccgccgccagaatcaaacctgcgggcaggaaaacgcgcggattgctgcgatcgcttacgctacccatgatgaatttgctaaatccataagcaatgctgatcccgctaagggcaaaacctaaatcaccgcgactgaatccctgctcaaccagataaggcatagcaagcgcaaagttcttacgaaccaaatagtaagccgcatagccaaagaatatccccaggaaaatttgccagcgcaatcgacgataagtcggatcgatctccgcggcaggtaagcgcgctttgtgtggcgctggtttaaaaatactcaacattgatagcctccgtggcccgtggtcttatttatgattaacagcctgattcagtgagagaacctgccgtttcttgagttgccgcgatgttaagaaaacattcataaattaaatgtgaattgccgcacacattattaaataagatttacaaaatgttcaaaatgacgcatgaaatcacgtttcactttcgaattatgagcgaatatgcgcgaaatcaaacaattcatgtttttactatggctaaatggtaaaaaacgaacttcagagggataacaatgaaaactcgcgacagccaaagtagtgacgtgattatcattggcggcggcgcaacgggagccgggattgcccgcgactgtgccctgcgcgggctgcgcgtgattttggttgagcgccacgacatcgcaaccggtgccaccgggcgtaaccacggcctgctgcacagcggtgcgcgctatgcggtaaccgatgcggaaagcgcccgcgaatgcattagtgaaaaccagatcctgaaacgcattgcacgtcactgcgttgaaccaaccaacggcctgtttatcaccctgccggaagatgacctctccttccaggccacttttattcgcgcctgcgaagaagcagggatcagcgcagaagctatagacccgcagcaagcgcgcattatcgaacctgccgttaacccggcactgattggcgcggtgaaagttccggatggcaccgttgatccatttcgtctgaccgcagcaaacatgctggatgccaaagaacacggtgccgttatccttaccgctcatgaagtcacggggctgattcgtgaaggcgcgacggtgtgcggtgttcgtgtacgtaaccatctcaccggcgaaactcaggcccttcatgcacctgtcgtggttaatgccgctgggatctgggggcaacacattgccgaatatgccgatctgcgcattcgcatgttcccggcgaaaggaagcctgctgatcatggatcaccgcattaaccagcatgtgatcaaccgctgccgtaaaccttccgacgccgatattctggtgcctggcgataccattagcctgattggtaccacctctttacgtattgattacaacgagattgacgataatcgagtgacggcagaagaggttgatattctgctgcgtgaaggggaaaaactggcccccgtgatggcgaaaacgcgcattttgcgggcctattctggcgtgcgcccgctggttgccagcgatgacgacccgagcggacgtaacgtcagccgtggcatcgtgctgctcgaccatgctgaacgcgatggtctggacggatttatcaccatcaccggtggcaaactgatgacctatcggctgatggctgaatgggctaccgacgcggtatgccgcaaactgggcaacacgcgcccctgtacgactgccgatctggcactgcctggtagtcaagaacccgctgaagttaccttgcgtaaagtcatctccctgcctgccccgctgcgcggttctgcggtttatcgtcatggcgatcgcacgcctgcctggctgagcgaaggccgtctgcaccgtagcctggtatgtgagtgcgaagcggtaactgcgggtgaagtgcagtacgcggtagaaaatttaaacgttaatagcctgctggatttacgccgtcgtacccgtgtggggatgggcacctgccagggcgaactctgcgcctgccgcgctgccggactgctgcaacgttttaacgtcacgacgtccgcgcaatctatcgagcaactttccaccttccttaacgaacgctggaaaggcgtgcaacccatcgcctggggagatgcactgcgcgaaagcgaatttacccgctgggtttatcagggattgtgtggtctggagaaggagcagaaagatgcgctttgatactgtcattatgggcggcggcctcgccggattactctgtggcctgcaactgcaaaaacacggcctgcgctgtgccattgtcactcgtggtcaaagcgcactgcatttcagttccggaagcctggatttgctgagccatctgccagatggtcaaccggtgacagacattcacagtggactggaatctttgcgtcagcaggcaccagcccatccttactcccttctcgagccacaacgcgtgctcgatctcgcttgccaggcgcaggcattaatcgctgaaagcggtgcgcaattgcagggcagcgtagaacttgctcaccagcgggttacgccgctcggcactctgcgctctacctggctaagtagcccagaagtccccgtctggccgctgcccgcgaagaaaatatgtgtagtgggaattagcggcctgatggattttcaggcgcaccttgcggcagctagcttgcgtgaactcggccttgccgttgaaaccgcagaaatagagctgccggaactggatgtgctgcgcaataacgccaccgaatttcgcgcggtgaatatcgcccgtttccttgataatgaagaaaactggccgctgttacttgatgcgcttattcctgtcgccaatacctgcgaaatgatcctgatgcccgcctgcttcggtctggccgatgacaaactgtggcgttggttgaatgaaaaactaccttgtagtctgatgcttttgccaacgctgccgccttccgtgctgggcattcgtctgcaaaaccagttacagcgccagtttgtgcgccagggtggcgtgtggatgccgggcgatgaagtgaaaaaagtgacctgtaaaaatggcgtagtgaacgaaatctggacccgcaatcacgccgatattccgctacgtccacgtttcgcggttctcgccagcggcagtttctttagtggcggactggtagcggaacgtaacggcattcgagagccgattctcggccttgatgtgctacaaaccgccacgcggggtgaatggtataagggagatttttttgcgccgcaaccgtggcagcagttcggtgtaaccactgatgagacgctacgcccgagtcaggcagggcaaaccattgaaaacctgtttgccatcggtagcgtgctgggcggatttgatcccatcgcccagggatgcggcggcggtgtttgtgccgtcagtgctttacatgccgctcaacagattgcccaacgcgcaggaggccaacaatgaatgacaccagcttcgaaaactgcattaagtgcaccgtctgcaccaccgcctgcccggtgagccgggtgaatcccggttatccagggccaaaacaagccgggccggatggcgagcgtctgcgtttgaaagatggcgcactgtatgacgaggcgctgaaatattgcatcaactgcaaacgttgtgaagtcgcctgcccgtccgatgtgaagattggcgatattatccagcgcgcgcgggcgaaatatgacaccacgcgcccgagcctgcgtaattttgtgttgagtcataccgacctgatgggtagcgtttccacgccgttcgcaccaatcgtcaacaccgctaccagcctgaaaccggtgcggcagctgcttgatgcggcgttaaaaatcgatcatcgccgcacgctaccgaaatactccttcggcacgttccgtcgctggtatcgcagcgtggcggctcagcaagcacaatataaagaccaggtcgctttctttcacggctgcttcgttaactacaaccatccgcagttaggtaaagatttaattaaagtgctcaacgcaatgggtaccggtgtacaactgctcagcaaagaaaaatgctgcggcgtaccgctaatcgccaacggctttaccgataaagcacgcaaacaggcaattacgaatgtagagagcatccgcgaagctgtgggagtaaaaggcattccggtgattgccacctccagtacctgtacatttgccctgcgcgacgaatacccggaagtgctgaatgtcgacaacaaaggcttgcgcgatcatatcgaactggcaacccgctggctgtggcgcaagctggacgaaggcaaaacgttaccgctgaaaccgctgccgctgaaagtggtttatcacactccgtgccatatggaaaaaatgggctggacgctctacaccctggagctgttgcgtaacatcccggggcttgagttaacggtgctggattcccagtgctgcggtattgcgggtacttacggtttcaaaaaagagaactaccccaccagtcaagccatcggcgcaccactgttccgccagatagaagaaagcggcgcagatctggtggtcaccgactgcgaaacctgtaaatggcagattgagatgtccacaagtcttcgctgcgaacatccgattacgctactggcccaggcgctggcttaaactcctttctgatgcccggtaagcatgtggttaccgggcatttttgcgtacacgattccgtgcccaatgtatgcgttgcaacgcagtgaaaattcctctgaaaacgtctcgcaaaggctgaaactggcagatgtcaaaggcctgggataaccgtaatgtcgcgtcatcataaatatcaggtgacggacaaccatgaccgaaagtacaacctcctccccgcatgatgcggtatttaaaacctttatgttcacacccgaaaccgcacgggattttctcgaaatacatttaccagaaccactgcgcaagctttgcaacctgcaaaccttacgcctggaacccactagttttattgaaaaaagtttacgcgcttactacagcgatgttttgtggtccgtggaaaccagcgacggtgacggctatatctactgcgtgattgaacatcaaagctctgcagaaaagaatatggcttttcggctaatgcgctatgccactgccgccatgcagcgtcaccaggacaaaggctatgacagagtcccgctggtggtgccgttgctgttttatcatggcgaaaccagcccttacccgtacagtctcaactggctggatgagtttgacgatccgcaacttgcccggcagttgtacaccgaagcttttctgttggtggatatcaccatcgtacctgacgatgagatcatgcaacatcggcgtatagctctgctggaactgattcaaaagcatattcgcgaccgcgatttaatcggcatggtcgacaggatcaccacgcttttggttagaggcttcactaatgacagccagctacaaacactgtttaattatctgctgcaatgcggcgatacctcccgtttcacccgttttattgaggagattgccgaacgtagtccactacaaaaggagagattaatgactattgctgaacggctacggcaggaagggcatcaaattggctggcaggaaggtatgcatgaacaagccattaaaattgctttgcgcatgctggagcagggctttgaacgtgagattgtgctggcgacaacccaactcactgatgctgatattccgaactgtcattaaaaggagagattaatgactattgctgaacggctgcggcaggaaggacatcaaattggctggcaggaaggtaaattagaaggtttgcatgaacaagccattaaaattgctttgcgcatgctggaacagggctttgatcgtgaccaggtgctcgcggccacccagctaagcgaagccgatctggcagcgaataaccactaattaacacaggcccacagccgatccccatgggcctttgatatcaataactaccttttatgcgtggcccatttttgccacttttaaacatcgccagtcgttgatccagggcatcgctgtagagcatcgtgtcaacgccaacagcgacaaagttcgctccccacgccaggcattgctgcgccatatcaggagccacagccagaaaaccagccgctttacccgcagcacggatccgccgaatactggtttcaataattcgctgcacttccgggtgcccggcgttatccgggtagcccaagctcgcagaaagatccgcaggtccaataaacacgccatcaatcccttcgacgtcgaggatttcgtccaggttatccagtgccgttttactttccacctgcaccaacagacaaaggctatcgttaacttgcgccatgtaattctcaatgcgtccccagcgcgcagcccgtgccacactggccccgacaccacgctcaccgtagggaggatagcgcgtggcagacaccacctgacgtgcctgttcggcagtatcgaccatcgggatcagtagagtttgcgcgccaatatccaggacttgtttaatcagcggtttactgccttccaccggacggatcacgggttggctggcatagggcgctaccgcctgtagctgatgataaagatcctgaatggtgtttggcgcgtgctccccgtcaatcagcaaccagtcataaccagaagtggcggcaatttctgccatataggcagtcgtactgcttaaccacagaccaatttgcacttcgcccttgcgtaaacgttctttaaagggattgcttaataatgcgttcatcgtgttccttaacctatttaatgatgtgccacgtcggtctgcgcaacagtgcgatttacacgcagagtgaaaataatcaggctaccgatgaccgccaccgctgccagcgtcagtaatcccgccgcatcgctggcaaataacgtttctgctttcacgcgcaggatcggggcaataaacccgcccactgcaccaaacaggtttacaaaaccaattcccgcagccagcgccgtaccggaaagcagttgtgtcggcatcgtccagaacactggctgcacggcaataaacccgatagctgcaacacacagcgctacgatcgccattactggagaaagcagcccggacagaccaataccaatgcccgccgccagtaatgtcagcgctgcgacattacgccgttcgccggttttatcggaatagcgcggaataagccaggtcccaaacaaggccgcaacccacggaatggcggtgaccacgctcgctgtaaagcccacttttgttcccagcaatgccgcaacctgggtcggcaggaagaaaattaatccgtaaaccgccacctgaatggtcaggtagataatcgctagttgccagactcggccattacgcagcgcatcgctcagccgagaagtcactttctgttgttcttcacttgccagttgattgataagcaacgttttttcttgtttactcagaaaacgtgcctgctccggtgtgtcatcaagccaaaagaatgtgaataccccagcaccgactgccaacaatccttcaatcacaaacatccagaaccagccgggatgccccataaatccatgcatctccaacagcgcgccggaaagcggacttcccagtgttaacgccagcggtgcgcccatatagaacagccccataatgctggcgcgattacgctgcggaaaccattggctggtgagataaatcataccagggaaaaatccggcctccgcagcacgaagcagagtgcgaactatcagaaatttcgcttcagtatcggcccatgccatggctgcgctaagaaatccccacagcagtgttgtcgtaccaatccaggttctggcccccagtttgcgcatcaaaagattcgccggaacacccagaaacgcatataccacaaagaaaatgcctgctcccagcgcataagcttcattactcaacccggtatcaatctggtaggtctgtttggcaaaaccgatattgctacggtcgagaaacgccagcacatacagcgccaacataaacggaattaaacgcacacggtttttcttcaccacggcgtcaagcaaagcggtgctcataaaaagctccttagaatatgtgggcgttaccgttgtcacagcaacgcccggagtgattagtggctgtaggggcgtttcaaattgcagtcatgattgagttcgacgccaaaaccgggtttatcaagcacacttttatgaatacgaccattcaccggaaccggctcattgagcagaatcgggtcaaactgcggacgcatcgtactacaatccgggctggtcatcaggaattcgctgaatggcgtattggtgaaggtgatcaccgcatggtgagagtaaacagagctaccgtgcggcaccaccagttgccccctggatttggcgattgcggcaatttccaccagcgtggttaaaccaccgcaccagccaacatccggctgcataatgtcgataccggtttcactaagcgtacgaaaagattgcagtgtgccgtggtgctcaccgctggtgaccatcattccgactggcgcgttgcgtttcagttcgcgataactttcatactgctgtggcggcaggcactcttcgatccatttcaggttatagggcgcgcaagcgtgggccagtttggtcgcatagttcacgtcctgactcatccagcagtcgagcattaaccagaaatcctcaccgcatttttcacgcatatccgcgaccatagcggcatctttgcggatccccgcatcgccatcatgtggcccccagtgcgtcggcattttgccaccgataaagcccatctcttttgccagatccggacgcgcacctgtggcgtagaactgaatctcatcacgaacagcgccgcctaaaagtttataaaccggaagcccgaccactttgccgaacagatcccacagagccagatcgacacaagaaatcgtattcatcaccaggccaccagagccggagtaatacagggtggcactgagcatttgatcgtggatcagtttgatatcactgacacatttaccctcaatgaaacggttaagatgtttttcgacaataaaacagcccatttcaccggctgtgctaacggcgaatccggtctggccgttttctgcttcgacttcaacaaccaacgtgccaagaacgttaatgccaaaactctggcgactctgctcgtaatcgcggtatttactcatcggggtggcaatatgatcgtctatccagtgattcgccccctggtcgtgataatcaccgccgccagcgcctttttctgctgtcgcaccgccagtaaaccaggcgcgaacctgtttaatttttggtagggtcatgatgttctccattgttaactggcttgtaagtcaaagggacttttccatcccaacagacgactaatatccctggcgcaggcaatggccttgcccgccagataatcacggtattcttcattgatttgtaagcgggtaccgaccacgctgatcgcagcggtaagctcgttattggcgttaaacaccggcgcagcgacacaacggacatcggcgtaatcttcgccgttgtcatagctccagccctgacggcgaatacgcgccagttcttcgtgaagttgctgtggatgagtaatcgttgtgggtgtcgcctgctcccagaccagcccttcgataatactttgctgtaccgctgcaggttgccaggcaagcaggcatttacctattccggagcgataaaggctaaggctttttccttcatgggaacgcacgctgatagtggcactactctccactttcaaaatgtaataagcgctgccgttatcaataatccccaggtgacataacagcccggtggtatccatcagttgcgtcaaacgcggtcgagccagttcccggagatccatcttgcttaacgcatgaccggaaagctccaccagcctggtccacaaacaaaaattttcctggtgatcaaggctaagaaaacgctgacgcctgagttcattaagcagcaaataggccgtgcttttagggattcccaatgtgtcaatgatcgtcgcagcactacaggggccaatgcgggcaatcaaattgagaatatcaatagcccgtgtcagggcgggaactttgctactttccaacatactggactccagtcttagatactggaatcagtctcgttgctcagggggagtaaaattgtgaagcgcatcaaatcccgctcctcgtccagcagactggagaaattacgcacaaatttgtgaatcagcgcacggattttttcttattgagtacaacaggttggacaaattttgccggagggggaatgtgccggtgcagtaaaccggcacagagtggcggaatcagacagataaggtcatggactcaacaacctcaatccagccatgctcactggcgatatcctggccgtttaaccaacggcgcagcatattcagtgccatcattgcgcacacttcctgacggatagccaggctgtagcgcgtagtgctgaaacgcacacgcagagcgaaagtgccgtctggcgtggctagcgcaaagttgagatgctcgttctcgaaaccgctaacagccagtgccagcccggcaaaatggttggcccgccgttctgtaatccagtgcgcagtttgcgccagggtttcctcctgactaggaaccacttcacacgccagcaatggagcacctgcgcgagaaagttgcaaagccaataaaccaccggtgaattgctcgctcaacgtcaggctgaactggcggttttgcaattcgcgactgatctgcgcgggcagtccttcagtgccttcgaaaatcacgctctgtccggcaacacgtttaacatccagccacagtttttccatcgcctgttgctcgcttgccggtccggtgagtttcagttcgatgataggcatactggagcgatagcccattgttacgcccggcggcagttgtagagtgtccaggctttgtgccagatcgctttcgctacgaccaaaagtagtcaaacgcagacaaaccggcggctgcggtaaagaaaaacgctcgcgcaggcgcggcaggatttcgtgctcgaccatcaccttaaattcactcggtacgccgggagtaaagaacatcaggcaacgattaagctgcacggcaaaaccacaggcggtgcctaccgggttattgataaattcagcactggcaggcagctccgcttgtttacggttgctcggtgccattactcgtccacgttcgtggaaatagcgttccatctctttgagccaggcttcatgcagcaccaggccttcaccttttgctgtcgcagcggcgagtgcgcttaaatcatcgctggtcggtcccagcccgccgttaacgatcagcacatcggcgtgctgactacgttcgcgaagaatggtgactaagtcatcaaggttatcccccaccgtattgcggcgagataatggcaacccctgatgaaagaaaaaatcggccagccaggcagcgttagtgtcaacgatttgcccgtgtaacacttcatccccggtggataacatttccacttttaacatggttatctcctgcttttgttatcgaatcactataacgcaaagggagataaggcgtagtaagaaactgaatggcgcgacagaatgccgcgccggaagggatcagaaactggcgttaaccccaacatacgggccgtcagccacggcgttgtcgcggttaccgtctttaccgctcagattcaggtagcgataacccgcctcaatactgactggacgcataatggtgtaacgcgcgccagcattcgcttcttcataactttgaataccgctggagaggctatccggagagtagtaatactcgccaaacaaacggaagctgttgccaattttccactgcaaaccacctcctaccgctgcggcataaccttcatcgccgtaattcgggttggtgtaaacgccttttccgccaacggtcgccattaacggcccgagaggcagattcaaccccagccccacgccagcgacatcaccgtcgtcgtcgttatgtgtccagttaccgcttaacgccaggcccgtcgtttcagtcccaaaaccgacaccaatattggtgtattctttacccgcctgaccgctgatgctcattgcattgacgcttgcagaaaccaacagcattccggccagacctgctagcgcaatttttttcattatcccctttcccacaagcaattaatcaaaattcccaaagctgcgggattgtactgcctggcacagaggattcaatgagcgaaaaaaaggatctagtcacttattgtaactaaatacttcttaaataattaaatgccgaaaaaataaacacactttatcgatacacacaaaaataataataagtacagttatcatcgcaaaagagattactgtcactttcacatatttgtgagttaccgtattctcatggtttctttttatttataaggaatatccctgtgcgacaacggactattgtatgccctttgattcaaaatgatggtgcttatttgctgtgtaaaatggccgacgatcgcggcgttttccccggtcaatgggcgattagcggtggcggcgtggagcctggcgaacgaattgaagaggcactacgccgcgaaattcgcgaagaactgggagaacagctgcttttgacagaaatcacgccgtggaccttcagcgatgatattcgcaccaagacgtatgcagatggtcgcaaggaagagatttatatgatttacctgatttttgactgcgtttctgccaaccgagaagtgaaaataaacgaagagtttcaggactacgcgtgggtaaaacctgaagatctggtgcattatgatttgaatgtcgccacccgaaaaacgttacgtttgaaaggtcttctgtaacaatgatgacagccattactggctgtcagattgaaaatttagtggttaacgaattccccatccagataaactttgcctttttccacatgcatgactaaaccatccagataatcaggtttaaatgtcgcgtcacgcttatctttagcaatatatgtcaggcaatgattatgggtgaaaataacgatatttttatcaggcgctttgctttgtaagtccttaattgcactataaatctcattaccgcactgaagaagtcgtttatctaccgtcaattttttacccgcactaaaccaggtagcgctctgaatggtccggacggtattactggaataaagatcgaaatcagggatatcagcactaaaagcgttgcccagttcacgggcatcctgggtacctttaaccgtaatacctgttttatcactcaagcattgattggtactacggtcgcaacgttcagcatgacgaaacaaaacgacaaccgggtgctgctgtgccagtctggccagtgttttattgtcgatacgtggcaaaccattgctactccaggcggcatgagtacccagtccggcaattgcagcgagcgccagtaaaatgatgatatattttttactcttcaagctagagcggcaaaaagctaacacgtaaactccacctatagacaagcgcaaccagacaattaccgtgaaattgagctacatttctggcgataattcgcagttggtgtaatattaaaaatcctacgatgtcggcaaaatgcctcaaaattttgccaaatgcaaagcctaaataagaaaaaatataaaaatttcaatatttacgtctaatattagtttcttaaggttaagttaatattctatccttaaaatttcgctccaaatggcaaaatatacacaacactctttatagcaaatataagtggacaggtattcaatggcggaaggaaaagcaatgagtgaatttttgccttttagccgaccagcaatgggcgtggaggaactcgctgcagttaaagaggttctcgaatccggttggatcacaaccggtccgaagaatcaggcgcttgagcaagctttttgccagttgacgggaaatcagcatgccatcgcggtcagtagtgccaccgccggaatgcatatcacgctaatggcgttgaaaattggcaagggcgatgaagtgattacgccttccctgacctgggttagtaccctcaatatgatttccttgttgggtgcaacgccggtaatggtggatgtcgaccgcgatacgctgatggtcacgcctgaagctatcgagagtgccattacgccacgcactaaagccatcattccggtgcattatgccggtgcgccagcagatattgacgccattcgcgccattggcgaacgttacggcatcgcagttatcgaagatgctgcccatgccgtcggtacgtattacaaagggcgacatattggcgcaaaaggtaccgctatttttagttttcatgccattaaaaatattacctgtgctgaaggtggcctgattgtaactgataatgaaaaccttgcccgccagctacggatgctgaaatttcacggtctgggtgtcgatgcctatgacagacaaacctggggccgtgcaccgcaggctgaagtcttaacaccgggctataagtacaatctgaccgatattaacgccgcgattgccctgacacagttagtcaaattagagcacctcaacacccgtcggcgcgaaattgcccagcaatatcagcaagcactggcagctctcccctttcagccattaagccttcccgcctggccgcacgttcacgcctggcatctgtttattattcgtgtcgatgaacaacgttgtggtatcagtcgcgatgcgttgatggaagcgttaaaagaaagaggcattggtaccgggttacatttccgcgccgctcacacacaaaaatattatcgcgagcgttttcccacgctgagcttaccgaataccgaatggaatagcgaacgcatctgttctttgccgctgttcccggatatgactaccgccgatgccgaccatgtcatcacagcccttcagcaactcgcaggacaataagccatgtttgaaatccaccctgttaagaaagtcagcgtggttattcccgtttataacgagcaggaaagcttaccggaattaatcaggcgcaccaccacagcctgtgaaagcttggggaaagagtatgagatcctgctgattgatgacggcagtagcgataattccgcgcatatgctggtcgaagccagtcaagcggagaacagccatattgtgtctattttgcttaaccgcaattacgggcaacatagtgcgattatggcgggattcagtcacgttactggcgacttaattattacccttgatgccgatctccagaatccgccagaagaaatcccccgcctggtggcaaaagccgatgaaggttacgacgtggtagggactgtacgccagaaccgccaggacagctggtttcgtaaaaccgctagcaagatgattaaccggcttattcagcgcaccactggcaaagcgatgggtgattacggttgtatgctgcgcgcctatcgccgtcatattgtcgatgcgatgttgcactgccatgaacgcagcacctttatcccgattctggcgaatatcttcgcccgccgtgccattgaaattccagtacatcatgccgagcgtgagtttggtgaatccaaatacagttttatgcgcctgattaatttgatgtacgacctggtgacctgccttaccacaacgccgctacgtatgctgagtctgctcggcagcattattgcgattggaggttttagcattgcggtgctgctggtgattttacgcctgaccttcggaccacaatgggcggcagaaggcgtctttatgctatttgccgtgctgtttacttttattggcgctcagtttatcggcatgggattactcggtgaatatatcggcaggatctacaccgatgtccgcgcccgcccccgctattttgttcagcaagttatccgtccatccagcaaggaaaatgaataatgaaaaccgtcgtttttgcctaccacgatatgggatgcctcggtattgaagccctgctggctgccggttacgaaattagcgccatttttacccatactgataatcccggtgaaaaagccttttatggtagcgtggctcgtctggcggcggaaagaggcattccggtttatgcgccggataacgttaatcatccgctgtgggtggaacgcattgcccaactgagcccagatgtgattttctctttttattatcgccatcttatttacgacgaaattttgcagctcgctcccgcaggtgcatttaatctgcatggtagcctgttaccaaaatatcgtggtcgcgcgccgctgaactgggtgctggtcaacggtgaaacggaaactggcgttacattgcaccgaatggtgaaacgtgccgatgccggggccattgtggcgcaactgcgcattgccattgcgccagacgatatcgctattacgctgcatcataaattgtgccatgccgcgcgccagctactggaacagacattacccgccattaaacacggtaatattctggaaatcgcccagcgcgaaaacgaagccacctgttttggtcgcagaacgccggatgacagtttccttgaatggcataaaccggcatccgtactgcacaacatggtacgtgccgttgccgatccgtggccgggtgccttcagctatgttggcaatcagaaattcaccgtctggagcagccgtgttcatcctcatgccagcaaagcacagccggggagcgtgatttctgttgcgccactgctgattgcctgtggcgatggcgcgctggaaatcgtcaccggacaggcgggcgacggcattactatgcagggcagccaattagcgcagacgctgggcctggtgcaaggtagtcgcttgaatagccagcctgcctgcaccgcccgacgccgtacccgggtactcatcctcggggtgaatggctttattggcaaccatctgacagaacgcctgctgcgcgaagatcattatgaagtttacggtctggatattggcagcgatgcgataagccgttttctgaatcatccgcattttcactttgttgaaggcgatatcagtattcattccgaatggattgagtatcatgtcaaaaaatgtgatgtcgtcttgccgctggtggcgatagccacgccgattgaatatacccgcaacccgctgcgcgtatttgaactcgattttgaagagaatctgcgcattatccgctactgcgtgaagtaccgtaagcgaatcatcttcccgagtactagtgaagtttatgggatgtgtagcgataaatacttcgatgaggaccattctaatttaatcgtcggcccggtgaataaaccacgctggatttatagcgtaagtaaacaattacttgatcgggtgatctgggcctatggcgaaaaagagggtttacagttcaccctcttccgcccgtttaactggatgggaccacgactggataaccttaatgcagcgcgaattggcagctcccgcgctattacgcaactcattctcaatctggtagaaggtagtccgattaagctgattgatggcggaaaacaaaaacgctgctttactgatattcgcgatggtatcgaggcgttataccgcattatcgaaaatgcgggaaatcgctgcgacggtgaaattatcaacattggcaatcctgagaacgaagcgagcattgaggaactgggcgagatgctgctggcgagcttcgaaaaacatccgctgcgccatcatttcccaccgtttgcgggctttcgcgttgtcgaaagtagcagctactacggcaaaggatatcaggacgtagagcatcgtaaaccgagcatccgcaatgcccaccgctgcctggactgggagccgaaaattgatatgcaggaaaccatcgacgaaacgctggatttcttcctgcgcaccgttgatcttacggataaaccaagttgacctaagatcttacggataaaccatcatgaccaaagtaggcttacgcattgatgtcgatacctttcgtggcacccgtgaaggcgtgccgcgtctgctggaaatcttgagtaagcataatattcaggccagcatttttttcagcgtcggcccggacaatatgggccgccatctctggcgactggtgaagccacagtttttgtggaagatgctgcgcagtaacgcggcaagcctttatggctgggatattttactggcaggtacggcctggccaggtaaagagattggtcatgccaatgccgatatcattcgtgaagcggctaaacatcacgaagtcggcctgcacgcctgggatcaccatgcctggcaagcccgtagcggtaactgggatcggcaaacaatgatcgacgatattgcacgcggtcttcgcactctggaagagattatcggtcaaccggtaacctgttctgccgctgcgggctggcgtgccgaccagaaggtgatcgaagcaaaagaagcgttccatttgcgctacaacagcgattgtcgtggggccatgccgttccgtccattgctcgaaagtggaaaccctggcactgcgcaaattccggtgaccttacccacctgggatgaagtgattggtcgggatgtgaaagcagaagattttaacggttggttactcaaccgcatcctgcgagataaaggcacgccggtttataccattcatgcagaagttgaaggctgcgcttatcagcataattttgtggatctcctcaaacgcgcagctcaggaaggcgtgacattttgccctttaagcgaactgttaagtgagacgttgccgctcggacaagttgttcgcggaaatattgccggacgtgaaggctggctgggttgccaacaaattgcgggtagtcgctgatgaaaagcgtacgttaccttatcggcctcttcgcgtttattgcctgctattacctgttaccgatcagcacgcgtctgctctggcaacccgatgaaacgcgttatgcggaaatcagtcgagaaatgctggcatccggcgactggattgtgccccatctgttagggctacgttatttcgaaaaacccattgccggatactggattaacagcattgggcaatggctatttggcgcgaataactttggtgtgcgggcaggcgttatctttgcgaccctgttaactgccgcgctggtgacctggtttactctgcgcttatggcgcgataaacgtctggctctactcgccacagtaatttatctcagtttgtttattgtctatgccatcggcacttatgccgtgctcgatccgtttattgcattctggctggtggcgggaatgtgcagcttctggctggcaatgcaggcacagacgtggaaaggcaaaagcgcaggatttttactgctgggaatcacctgcggcatgggggtgatgaccaaaggttttctcgcccttgccgtgccggtattaagcgtgctgccatgggtagcgacgcaaaaacgctggaaagatctctttatttacggctggctggcggttatcagttgcgtactgacggttctcccttggggactggcgatagcgcagcgggagcctaacttctggcactattttttctgggttgagcatattcaacgctttgcactggatgatgcccaacatagagctccgttctggtactacgtgccggtcatcattgccggtagcctgccgtggctgggattactccccggtgcactgtacacaggctggaaaaaccgcaagcattccgcaaccgtctatttgttgagctggacgataatgccgctgctgtttttctccgtcgctaaaggtaaattgcccacctatattctttcctgctttgcatctctggcaatgctgatggcgcattacgctttgctggcagcaaaaaataatcctctggcgctgcggattaatggctggattaacatcgcttttggcgtcactggcattattgccacatttgtggtctccccgtggggaccaatgaacacgccggtgtggcaaaccttcgagagctataaagtcttttgtgcctggagcatttttagcctatgggcatttttcggctggtacaccttaacaaacgtcgaaaagacctggccttttgccgcgctttgcccgctggggctggcgttgctggtaggatttagtattcctgacagagttatggaaggaaaacatccgcaattttttgtcgagatgacacaagaaagtcttcagccaagccgctatattcttactgatagcgtcggtgttgccgcaggtctggcatggagcctgcaacgcgatgacatcatcatgtatcgccagacaggtgagttgaaatacggccttaattatccggatgcgaaagggagatttgtcagcggtgatgagttcgcaaactggcttaatcaacatcgtcaggaggggattattactctcgtgcttagcgttgaccgcgatgaagatatcaacagtctcgccattccgcccgcagatgccatcgatcgtcaggagcgtctggtgctgattcagtatcgtcccaaatgatctggctaacattagtctttgccagcttgcttagcgttgccgggcagttgtgtcagaaacaggcaacctgctttgtggcgataaacaaacggcgcaaacatatcgtgctgtggctgggactggcgctggcttgtcttggtcttgccatggtgctctggctgctggtcttgcagaacgtaccggtaggcattgcttacccgatgttaagtctgaattttgtctgggtgacgctggctgcagtaaaactgtggcacgaaccggtaagcccgcgtcactggtgtggggtggcgttcattattggcggcattgtgaacctcgggagtacggtgtaatgggcctgatgtggggattattcagcgtcattattgccagtgttgcgcaattaagcctgggttttgcggcgagtcatctgccgccgatgacgcacttatgggattttatcgcggctctgttagcttttggcctggatgcccggatactgttactcgggctgctgggttatctgctttccgttttttgttggtataaaacgcttcataaacttgcgctaagcaaagcctatgccttgctcagtatgagttatgtgctggtatggattgctagtatggtacttcccggctgggaagggacttttagcctgaaagcactactgggagtagcctgtattatgagcgggttgatgctgattttcctgcccacgacaaaacaacgttactgagttttccctgccactttacactgccgttcccactcatcggggctataactgcttgcgctgaggactttcaccgtatgcagcttttcacgattaatacaataaagcgcattctgcaaagggctgagtaaatcccccactttcacggcgaagtcactcttcacttcggcgatcatttttatcgcgccgccagcatcgcagagcataagtacatgtctgttatcttgtttattgcagcagctttttttgaccagccattccattgcattatcctgtttgctaagagttttcacatcaatttacagattaacagataaactctttatcaacggcaatggaatggcagaaatgagaagtgaaacggagggttaattattgctgacgttgcacccactcttttagcgcctgacgactaattttaataccgccgtttttcagctccggcggcagagttagccagcgcaccggttgttgaaaacgggccagcttatctttcacccattcactaagatcaacgctctcgtggtcatactccatcaccgccaccggtcgatgaccaaactccttgtcggcaacggggacgataaacacctgcaaaaccgcaggatgtgcagcaattacgcgctcgacttcttccggctgaataccctctccgccactgaagaatagattgtctaaacgtccgacaatggtcagcttgccattatgcatctcaccgcgatcgcgcgtagcgtaccagccttcgtcattaaccagactaaccagttgcccgttacgccagtaaccttctgccatactggcagcccgcagccacacttcattattaacgattttcacttcccgacccggcagcgggctaccaacgtctgccaggccgtcggcttctttcgcacacaccgtggaggcaaactcggtcagaccatagccgcaaaagcaacgaatcccctgctcgcgcgcctgttccgtcaactcgaccgggatagccgcgccgccaagtaacaccgctttcagggaaacggaactacggttaaccagcaaacgccagagttgtgttggcaccagactagcgtgagtacagcctgccagcatttgctccaatggctgtttatcacgtaccgtcatccgcgcaccagcgtataaccagcgccacataattccctgaccggagacgtgaaacagcggtaaagagagcaaccaatcatcgtgatcgccaaacggaatcaggcttaacacaccttgcgcactggcaagatgggcctgataagtatggacagcggctttcggcaaaccggtagaaccgctggtcaacgtcatactgcacagacgcgtcggctgccacgtagcggcatgtgcgccttcaaccagctgaatgtgcaggctcgttaatgccggaaacgtgttttccccatccggcaccagagcaaattgcagcgtcagattgggcagcaattcttcaagcaacggttgcggcagctgagggttcacgggcaacacccgcgccccgcattgcagtaacgccagccaggcgagcagcgtttgcggcgtattccacgcccgcaacatcacgccgctgccctcaaccaccccctgcaccgcaaatccggaggctaattcatcgacgcgagcacaaagctcgcgccagttgagttgctcgtcattaagacgtaaggcgatggtttctccccgcacttgccgccagtgacgccacggccagtcagagaagatcataacaaccgctccagtgcatcaacttccacgacaggcagcgtgctacccggccagcgacgtacctgctgcgcctgcatcagatccagcgtgtccagccctggaatggtgtccggcgttaaccaggcggcaatccgcgccagttgcgttaagcctaagctgctttcaatggaagaactgatcaccgccgtcagccccagcgcgtgcgccgcctgtacctgctcgcgtactttttccagactgcccgtgagcgtgggtttgataactaccgcgcgcacgccctcttcagccacaaaggcaaaatccggctcgcgcaggctttcatcccaggcaatggcaatgccggtttcacgggcaaacgctcggctatcatcgcgggttttgcacggctcttcgagaaacgcgatgcggtcgcgataatccgggttaacgtatttggcaaactgctgacctttcagcggtgtccaggcgcgatttgcgtcaagacgcaaatgcagatccggaattgcctccagcaacagattcaccaccatgccgtcgcgcaccgcttcgtacaatcccactttgaccttcgccactttctcgcctggcatatctgcaagtttgaggatcagatcgtccggatcgccattacacagcggtgccgcacggtagttggctgcttgcggcaacgtatctgtcagttctgccaatgcacagcttacgccaaaggccacggaaggcatctgcggtagctcgcaatcgcctgccagccagttatttacccaggcaagcagcacactttgcgcctcttcccaggtttcctgactgaagcccggcagtggggagatctccccccacccttcgcgctcgccttcacgcaggcaaacatacagcccgtcgcgggtttttaaccgcctgtcgcgcagaaccacccccgcgtccatggggatctgccagcggtatacctgcgcgctacgcattacggattccgtttgaatttgctgaagtcaggctgacgtttctggttgaaggcgttgcgaccttcctgaccttcttccgtcatgtagaacagcatggtggcgttgcccgccagctcctgcagccccgcctgcccgtcacagtcggcgttcagtgcagctttcaggcagcgcagcgccatcgggctgttttgcagcatttcgcggcaccaacggacggtttctttttccagatccgccagcggtaccacggtgttcacaaggcccatatccagcgcctgttttgcgtcgtactgacggcacaggaaccagatttcacgcgcttttttctgcccgacgatgcgagccatgtaggaagcgccccagccgccgtcgaaggaaccgactttcgggccagtctgaccgaagatggcattatctgccgcgatagtcaggtcgcacatcatgtgcagaacgtgaccgccgccgatggagtagccagccaccatcgcgacaaccggtttcggacaggtacggatctgacgctggaagtccagcacattcaggtgatgtacgccggaatcatctttatagccgccgtaatcaccacgcactttctggtcaccaccggagcagaacgctttatcgcctgcaccagtcagaatgatcacgccgatgttgtcgtcataacgcgcatctgccagcgcctggatcatctcttttaccgtcagaggacggaaggcattgcgcacctgcggacgattaatggtgatttttgcgataccgtcggtggatttttcataacgaatgtcctcgaaaccttcggagcagtcgtgccattcaaccggtgcgtaaagcattgcttcatcaggataaatcatattgtgtcctttagtcagaaacgcaagatctgcgccagacttgcgattacgccagcgggattttcccgatgcgcgttatgtccggcgcgaggaatgacatggcagtcggcagccagttccgccgccagggcgcggaatttgctgtcacgttcaccacataaataataaaacgcaaatgtgcgggcgctaaggttagcacgtaaatcaggctggacggcgagagaagtcgcctccagcatggcggcaagcgttgcgccattattgttgctgcgcagcgccaccagctcccggcgttgatcgtcattgagactggcaaaaacaggctgttgataccagtcggcaaataccgccgttaacggttctgtgagaaaacgctgcacccattggcgatcggaacgctgacgttccgcacgttgttcagcattttgcagccccggatgcccgccttcgacaataaccccacaaagccccgccagcccctggcaagccgccatcatcgccacccgtccaccaaggctgtaccccaccagccagaagtcaaggatgttgtaactaaccaaggttttacgcagtaagtcggtgacatcatcaaatccatcgacgctaatcgccgcgctaccaccgtgacctgggagatcaacatacaaccgactgtagtcggcaaacgcctcgcccacttcttgccattcgtggcaatcgccggaaaaaccgtgcaaaaacaccagccagggtaaacctggttttccgtgttttgcctgcgcgtgcaggatcataaatggcttacctgcgccagaagttgctggagcgtttgcgcaccatcggtgtcgttaaccaccatttcaatcaccgtggtggttggcgtgcgccaggcgtcggcaaatgccgtttcaagttcctgccagttttgcggacgatgatatttcagctcgaacatcgcggcggcgtgctcaaaatggacgttttgcggcatcagatagaaacgctcacgctcgctttgcggcgttggcaacaggctgaaaatttgcccgccgttgttgttcaccacaattaataccagcggcgcagaaacctgacgcaataacgccagcgcgttgagatcgtaaagtgcggagagatcgcccacaatcgccagcgtcggtttgccgcttgcccgctgaacgccggcggcggtgctaagcagcccgtcgataccgctggccccacggttgctgtacaccgggtaacctgccggaagttggctaagcgcatcaatcagacgtaccaccaggctgttaccaacaaacaattgcccctgttcaggcagatagtcgcagatgcgatgcgccagttgcgcttcgccaaacgcatcacggcgggcaataaccgcctgcattgcctgttccgccaggcgcgggatttcaacgcaccagggctggcgtttttctgccggatgcagctccagccagtcggcaatattggcaattaagcgacgtccgcgatggtgtgccggatcaagtcgcccttcaatgtcatcaacaatccagtactcttctggttcacagcttgcctgccattgcaggagccgtttccccgtcaggctgcttcccagttgcaccacaatttgcgcctgctgcagctcgctggtcgctttggcattgcctaaccaaagatcggcacacggcagcggctgcccggtttgactcagcacatcgccaatcagcggccagccaagagtttgcgcccacagggcaacttttttgccctcttccgcactcatgcgcccggcaaccaccacgccgcgcttttgtcgccagaagaaccagtcgcgctgtttttcactttccagacgaggcgcttcacgcagccacggtttgtcttcctgccaccagtcacccagacgctgttgccagctaagcccggtatcgtccatttcgccatacagcggttcagcaaacgggcagttgatatggactccccccgcatgaagcgtaccgagagcgtggtcgatggtagaaaccagccaacgtgcggggatatcctgggtcgggcgcggcaaactaatactgtgcgtggggtgagaggcgaacattcccggctggcgaattgcctgattcgcgccgcagtcaattagctccggcgggcgatcggcggttaagagaatcagtttttctccggttaacccggcttcaatcagtgccggatagagatttgccaccgccgtgccggaggtcacaatcaccgccaccggctgcttgctgactttcgccagccccagcgccagatgccccaacccacgctcatcgaaatgggtgtggtgaatgaatgcggaattctccgccgccgctaacgttaacggtgtagaacggctgcctggggcgatacagatgtgtctgacgccgtgacgcgttaatgcttccagaatgaccgccgcccagcgtcggttaaatgcgcttacactcatgagtttgtccggtatcaatattgcggctaagtataaggagctacaaaaatagattattgatatgaatcggtaatgatgcgactcattattattccatttgtaataaagtacgcagccctgccgctttgttgtcgatttcctgccactcttgctcggggtcggaaccacggacaatgcccgcgccagcatataatcgcacgacattgccgctaatttttgcactgcgcagggaaacgcagaattcgctttgttgtaaactgagatagcccgcagaaccggcgtaccattctcgggtgaacggttcgtgacgggcgataaactgtcgcgccagatcgcgcggtaagccagcaactgctgccgttggctgcaactgatgtaaacagatcacatcatccgctttgttgagactagtccagatacagcggcgaagatgctgcactttacgcagacgcagtacctgcggcggtaaaacatccagcgtctgggtatcggcctgtaatcgttgacagatatcttccaccaccagcatgttctcgcgctggtttttatcatccgccatcagccactctcctaactgctgcgcctgcttatcatcaggattatttgctactgttcccgccagcgcttcagtacgcagcgctttgtcacgccgccgccataaccgttccggactagagccaagaaaagcattttcgccatcaaaggccatgtaaaaatggtagcaattcagattcagtcgacgactggcagccatcatcgccgccgcgttgaccggacttgcgaaatgcaggtcagttgcccgagcgagcaccactttgtcgagctcaccttcggcgatggttttcgttgccagttcgattaattgcgtccagcccgttttgtccggccagtgttgttctcgcgtggtggttaaatgtaacccaggcaagggcttgatactcaccagtgtggcgataaattcttttgcctgaatcgcatcgtgctgaagggagctttcgctgaatagcgtcagccgcagcgtggctttaccgccacagcgtcgccattccaggcggggtaaaagtaaattgccctggctcgggtcaaaagcattcagcccccaaatgcgtaagtcggcgtgttccgggtgctggcgaagaaaacgttgtgcctggtccaagctcgtaaaacgggtaatcgcgcccaggacgacagcttcttcatcaccattacgttgttgccagtagaattgcgggtatgtttgctgactggccagccagctcaaggcatcaaaagcgtctttgagagggaaaggaatatcgataacccgaatgccgggtgtcgccggaatctcttggctcaaatggcgcagtagattttccagcgccgtagtaagactttgcacgcggacctctccctgttaaaagcctcacattatacggggtactacaaaaaaaatgcagtaccccggtgtagggaggttttaacggcgtgccagcaacagtcctagtaccagcccaacggccgcgcccacaccaattccttgccagggtttttcgtggacgtagtcatcagcacgataaactgcctgcttcgcccgatagtaataactgtcactagcctggctaacccgttttttcacatcatccagcgctttttctgcacgcgctttcagctcaacatatttctgatcggcgggatcgccagaggagcggagcacctcttccagtgtttcactaagcagcgtcaggtcgtcatcgatacgtgtatcaccaaactgattagacattctcgttctccatttgcgtaaaacctgtcactaactatagacaagggttgttgattacgcctgaattacctcgcgtgccatcccaatgtgtgggataccatcttcttcatagacctccgtcacagggataaaaccgaaactctggtagaagttttgcagatgcgcctgcgccccgaggtaaacaggcttatcaggccagtgatgcgtacatgtttcgagtgttttactcatcagctgctgccccactttttcgccacgcaacgcttcactgacaatcacccgacctataacgaccggctcaagatcatcatcacttttcagaatcctcgcatacgccaccagttcatcatttttccaaccgagaatatggcgattatcccccgtcaaatcatcaccatcgatatcctgataagggcaattctgctcgacaacaaacaccgcgcaacgcagttgtaataaggcataaagctgggaaacgcttaattcagagtgatgcagatcttgccattcaatcataatgctctccttttagatgtatgccttatactagccggaatattttttgaaacgtgatgaactcatggaattaatttttttaggtactagtgccggtgtgccaacccgcacgcgcaatgtcacggcaatattgcttaacctgcaacatccgacccagagcggactttggttgtttgactgcggtgaaggcacccagcatcagctactgcataccgcctttaaccctggaaaactggacaagatttttatcagtcaccttcatggcgatcatctttttggtttacccggcttgctgtgcagtcgttctatgagtggcattatccaacccttaacgatttatggtccgcaaggtatccgtgaatttgtggaaaccgcgctgcggattagcggcagttggaccgattatccgctggaaattgtcgaaattggcgctggcgaaattctcgatgatggcctgcgcaaagtaaccgcttatccgctggaacacccactggaatgttatggctatcgtattgaagaacatgataaaccgggtgcattaaatgcccaggcattaaaagctgctggcgtgccgcctggcccactgtttcaggaattaaaagcgggcaaaacaatcacgctggaagatggaaggcagattaacggcgcagattacttagctgctccagtgccaggtaaagcgctcgctattttcggcgataccggcccctgcgatgccgcacttgacctggctaaaggtgtcgatgtcatggtgcacgaagcgacgctggatataaccatggaagccaaagccaatagtcgcggccatagctctacacgccaggctgcgacactagcccgtgaggctggagtcggcaagctaatcattacccacgtcagcagccgctatgatgacaaaggttgtcagcacctgttacgtgaatgcaggagtattttcccggcgactgaactggcgaatgatttcaccgtgtttaacgtttaactctgcttattattaaaaacagggcgaaacttgccctgttatcgcaacccgcgctacatatatccacccacacaggcatattgagcgatttttgatatttattcatctccttacgcactatattcagagcaataagttgcctcttttcatcttgattcagcacaacctttgcaactaaaaggagcccatgatggttacagttgtcagcaattattgtcaattatctcaaacgcaactcagtcagacatttgcagaaaaatttactgtgaccgaggaattactgcagtctttaaaaaaaacagcgttatccggagatgaagaaagcattgagttactgcataatattgcgttaggttatgataaatttgggaaagaagctgaagatattctttaccatattgttagaaccccaacaaatgagaccctaagcattatccgacttatcaaaaatgcttgtttaaaattatataatctggcacatatcgcaaccaactcccccctcaaaagtcatgatagtgatgatctcctgttcaaaaaactattctcccctagcaaattaatgacaattatcggtgatgaaattcctcttatatctgaaaaacagagccttagtaaggtgcttttaaatgatgagaataatgaactgagtgatggtacaaacttctgggataaaaatcgtcaattaaccacagatgaaatagcttgctatcttcagaagatcgccgctaatgcaaaaaatactcaagtcaattatcctactggtctctacgtcccctactccaccagaactcacctggaagacgctctcaatgaaaatattaagagcgatccaagttggccgaatgaagtccagttattccccataaatactggcggacactggatattagttagcctacagaaaatagtaaataaaaaaaataataaactacaaataaaatgcgtcatattcaacagtttgcgtgcactaggctatgataaagaaaatagtcttaagcgtgtcattaatagttttaattctgaactcatgggagaaatgagcaataataatataaaagttcatttaaatgaaccagagataatatttttacatgccgatcttcagcaatacttaagccaaagttgcggtgcatttgtgtgcatggcagcccaggaagtgattgaacaaagggaaagcaattctgacagcgccccctatacgttattaaaaaaccatgctgacagatttaaaaaatatagtgcagaagagcagtacgaaattgattttcaacatcgactggcaaacagaaattgttatttagataaatatggcgatgcaaatatcaatcattattatagaaacttagaaataaaacacagtcaacccaaaaatagagcatccggcaaaagagtgagttaacatcattgttaattaattcgaccagtcagcaaatatgctgactggtcgaacatagtttgctaaacagtcatcactgactgatgtcagtcacaccatccgccagttcaatcaggcgaataaattccgccctgtaaccctgtggatcttccccttttgcctgctgagcccactgtttgatctgctgccaggaggtattgttcaggtattcagaaccgcgtaacttttgcccatatgcagctactgctgcgcgaaaacgcatatcttcagagggcgcgtttattgttggccccagcgggaattcaactaactgactttcttttccctgcgggtatttccagcgaatttttaaccaggccagttctttcgttttgtcgcttttcgctaatttgttatccggggcatagcgtaacttatcaatacttgctttttgcccgttcagcgttaattcgaataacaacgttatatgtttgcctgcgcctatatcccctgcatcaacgttgtcgttattaaaatgttccacccgaagttggcgcttttcataaccaatctgacggtattccgttacccacgcggggttaaactcaatttgcgctttgacatcttttgctacggtaatcaacatctgccgcatttcactattcaatactttctgcgcttcagagagggtatcaatgtagctgtagttgccgttaccaacatcggcaattcgcaccatcattgcctcgttgtaattgctattccccacgccaaacgtgctcagagtaacaccagactcccgctgttttttgaccatactttcaatgctttttggatcgtcaatgccaacgttaaagtcaccgtcagtggctaataaaatgcgattgatgccgcccttaataaaccccttcgtcgcctgctgataagccagttccagcccggcaccgccattggtactgccttcggcatccaggctatcaattgcggcattaatttccgccttatgactcccggagatagaaggcaatgcaatacgggagtcgccagcgtaggtcacgatggcaatgttatcctgctcacgaagttctttgaccaataatttcaagctagactggataagtggcaaacgttcatcagaaatcatactaccagaagtgtcgataagaaagaccagattagaagctggtaactcttcacttttgcgatctttcgccaggatatcaactttcagcaatgttcgctgttcattccatggtgcaggtgccaattcgtagcgcatagcgaaaggtattggcttagaggccggaatagattgtttgtctttgatatcccaatcagacgggaaataattgactatctcctccacccgcacagcgtctggcggaggtaacagcccttgattgaggaaacgccttacattcgcataactgccagtgtcaacgtcaagactaaacgtcgccaacggattttgcgctacctgcttaaccggattatcatcgaactgctggtagcgagcggttcctggatttgcgatatgtgtagcttttgctttagccgctcttgcaaatgttggcgcttcctgcaatcgcccctgtaaagcctgtttgtcactatattgttgcacttcttgctgggccaaggctttcgcggcggcggcgctttgctcagcctcttttattgcagcttgctgcgcggcaagcacttgctgctctgtgggagtactgggttgttgttgctgactttccttattctcaggttgcggcccacatccactcaaaatcaaactactcataagcaacatgattatatttttatttcgcatataaaatccttttaaataaactcaggcaccagacataaaatatactctttgtataatcctgctaatcttaataaaatacaatatcgaaacccatagcaaataatgattcaacaacgcaacccattaataatttgcatatgaaaaaaataatctttgcttttattatattatttgtgtttttactccctatgattattttttaccaaccctgggtcaatgcattaccgagtacgccccgacacgcaagtcctgagcaattagaaaaaacagttcgttatcttacacaaactgtgcatccacgtagtgccgacaatattgataatctgaataggtccgcagaatatataaaagaggtctttgtcagtagcggtgccagagttaccagccaggacgtccccattacgggtggcccctacaaaaacattgttgctgattatggtcctgccgatggaccgctgattattattggtgcgcattatgactctgccagcagttatgaaaacgatcaattgacctatacgccgggcgcggatgataacgccagcggtgtggcaggattactcgaactggcacgtttgttacatcagcaagtaccgaaaacaggcgtgcagctggtcgcctatgcgagcgaagaaccgcccttctttcgtagcgatgaaatggggagcgcggtgcatgcagctagccttgagcgtccagtgaaattaatgatagcactggagatgattggctattacgactctgcgcctggaagccagaattacccttacccggcaatgtcctggctttatcccgatcggggagactttattgccgtggtcggcagaatacaggatatcaacgccgttcgtcaggtaaaagcggcattgttgagttctcaggatttatctgtttattctatgaataccccagggtttattcccggtattgatttctctgaccacctgaattattggcaacacgatattcccgccataatgattactgacaccgctttttatcgtaataaacaataccacttgcccggtgataccgcagacagattgaattatcagaaaatggctcaggtagtggatggtgttataactttgttatacaacagtaaataataaaaatttctcgaggcgggtccagaaaaagcgacatgcacattttattttccctcatctgttttaagatgcgaaacatgaaattcaacggaggaaaaataaatgggaatgattggctattttgcagaaattgacagtgaaaagattaaccaactgcttgagtctactgaaaaacctttgatggataatatacatgacacgcttagtggattacgccgactggatattgataaacgctgggattttttacactttgggctgacaggcacctctgcttttgatcccgcgaagaatgatccgctgagtcgtgccgtgcttggtgaacacagcctcgaagatggcatagatggcttccttggattgacctggaatcaggagttagccgcgacaatcgaccgactggaaagtctggatcgaaatgaactgcgtaaacagttttccattaagcgactcaatgaaatggagatttatccgggagtgacctttagtgaagagttagaggggcaactctttgccagcatcatgcttgatatggaaaagctgattagcgcgtatcgacgtatgctgcgacaagggaatcatgcgctgacggttattgttgggtgatatagcttgatgcctgggggagaaagacccattagttaagatttacgccaggatcatcttgaaaaaatctttaaccatggtccggtttttatccccttgtataaatattactaaatgcttgcttagtcgcattgttaaatgcaataccgtatattcggtatgtaacagcgatatcctctgtgctggcaacgatctgtcatgcttgatgaaaacggaattgaacctgtcattaccaggtagataaaaagcctgttcaattttgggattattttttataactcgtgtctgttatggcgacacgggaaaacatcaatattgtccttcacaaattgcagtaatatagaatcaacctctcttgcaagttggtcacaatgtattataagcattttgaatatgtcatcctctgtaatctcgtgaaaattttcggccttgtcttttagctcatcatatcggattcttgcagtaaccattttttgggcgagttctaataaccccaaagcttgcaattgctggtgagtatgatcactttcaaaaaatatcccacactccattccttcccaaccaacatattcatgccattcataaaccagcataaatgtttgtaaaactggcggtaataattggatatctgcaaaaccaaaccaaaacttacgcttgagatcccactcatattcaatcgccaatgctatattgtttaaggcatctccggcatccttatttttacgcaaaatcaattccgtcagtgtatagcgttgttcatcaatacgccgaagagcttctgcaatatcatagtttgtagccaacaaaacattctctgcttcctgatgagtgacgtctgcttttgccgtcaatatattgatttggtcaatatgaaacaacttgatggcttcatcaacatcaccgccagtcctctctaacaaacgtctggcaacctggataccgacaggtacgttcttccgaagtttacgaatttcacttaaccattccatgtcaaacccctttaaatatttatgatattaaatataacaacgtctggataacgacccggcctgactgaatatctcacgttttcctgcttaacattcatgttatgatgctcttgaaactaataatacgtatggaattgtcactatttatctgctaatgaatagtaacaatgtcattcgtttgatgaatatattatttcagggaataattatgacacctttagaacgcattacccaacttgttaatatcaatggtgatgttaataatcctgatactcctcgtccattgttatctcttgaggatttttttattgacaataatatccatggtagtatatgttgcaatgtgattccagaacaatctccgcaagctatctatcaccattttctgaaaatacgtgagcgtaacaatgttagtgatgttttggtagaaattacgatgttcgatgacccagactggccctttagtgaaagtattttagttatcaccactgctagtccagaagaagttcagagctggtttgtagaagaaattgcccctgatgagtgctgggaaggatggagtgaagatacggagcatggatgggttgaagtccctgtgggtatgcatccggttacttgttggtgggattaaaacatttatataaacagataagcggatgtttacataaatttttatgtgaaggaacatgatgaaacttattcctcgcagtagtgatattagtcctggcattgatggaatttgcccggggccttttcctccgaacggatttaccgtacttacagatgcagcatatggtaacggagactgtttcggtttgtactggcctattggtcaggagcataaactacctatagtgtgcgaaacgtaccatgacgaatggcgaatcgtacctgccttttccagcattaagaagttcgaagaatggctggaagtgaatgatgatgatccccatgaaaatggcatcagcatcgaagatcaagactttgcagcaaatctcttccgtgttgctcggaaatgtcttagtacgggaaggcttgatgacgcactgccactgttacagcgagcaacagaacaattgcctgaagtcagcgaatattggttagcactggcaatccagtatcgccgatgtaaaaaaacagaagctgcagcacaggctgcgcttaatgcttatcttggcaattgggcatttggtgttcctgacaataaagtcattcatttgctgagtcaggccgcagatgtcccgaatttccaggatgatcctgtgattcagtgcattaaagaacaaggattagatcttagctttggaggaacaaaggaaaataataattaccccttgatgcagatgtgtgttgatacttattttgcgcagagaaaaccgcttcaggcattaaccctgttacataattatgcctggataatgtccagtgaaacgactgcatttcaggaacgctatgattttaatatcgatgaatggcgggcaaaattcaggcagttatgtttagagtattttggcgatagtcgtacacagttcacttaacgctctgcgtctatctactatcccttctttttcagaaaaaccgccgagcatgtcggcggctttctgacttacaaagtaacagattacatcagcggcattgccaaacgcacaatgctaatcagcggttgtggccatacacccagcaccagtaccaacagtgcagagatcagcacaacgataccgcccgcgctgtactgccagttacttggtgcatcgcgacccggttgttccggggcgtgaagatacaggctcaccgccacgcgcaggtagtagtagaggccgattgcgctaccgacaaccacggcacccaccagccaccacaagtgtgcctggacaccgaccgccagcacgtagaacttaccgataaagcccagcgtcatcgggataccggccagagacagcatcatcaccgtcatcactgccgcgaggatcggacgatgccagaacagaccgcggtaagagaacagggaatcagcatccgggccacgatacgggctggacatcaggctgaccacgccgaacgcgccgaggctgctgaacagataaccggccaggtaaacccctaccgcttccatgctcatctcgccggtttgcagcgcaatcagcgctaccagcagatagccgaggtgagagatagaactgtaaccgagcagacgtttgatattggtctggctcagcgccatcaggttaccgaagatgatggaggcaaaggcgataatcgccagcaccacgcgaatcgcttcgctgtcacccaccggtgcgtagaggaacagacgcatcaccacaccgaagatagcgattttgctcgccgtcgccaggaaagtggaaaccggcgcaggcgcgccctggtatacgtctggcgtccacaggtggaacggcaccagagagagtttgaagccgaggccaacaatcatcaggccgaaacctgccagcaacagcggctcgttgagcataccgtcgccaaggtttttacccaacgcgacaaagctcaggtcgccagactgcgcatacaccagcgccataccaaacagcaggaaagaagacgctgcggcagaaaggatggtgtatttgatactggcttccagactacgtttctggcggaaagcgtaaccgaccaggccaaacagcggcaaagagatcagttcgataccgaggaacagagacgccagatggttggcattcgccagcaggatcccgcccagcgcggcaattaacaccaacaggtagaactcatccttgttgtcgttatagccttcaagccacgggtaggcgaaagtacaggtggcgaggctcgccaacaataccagcccggtgtaaagcatggcgaaaccatcaacgcgcatcagcggcgtaacgtccatagcgcccgcctggccaacaaaccagagcgaaaccagcgccgcgttaagcccaataaccgagagcgtagcgttgaggaaatgattgcgtcgccacgcaatggagagcatcacaaccaccaccgtcaagccgacgatcagcaacggtagcagtgcgatcaggttttgtggagttattgtcatggcgatttacggccttgtagtagtaacggaattaacaaaccactgctggatattgccaatcgcggagtggctggtatccagaatcggctgcggatagaagcccagcagtaccagcagcaccaccagcaacaggatcataaacagctcacgcaggctcatccctggcagttcctggctggcaatctggcttttcgctttaccgaagtaagcgcgatgtaacatcgccaggctataaacagatgcaaagaccagcccaaaggtagagataacggtaatcaccggtacaacctggaagctgccgaacagaatcataaattcgccgacgaagttaccggtgccaggcatcccaagcgttgccaccgcaaagaacaggctcagtgctggcagccatttcatcttgctccacagaccgcccatcatgcgcatgtcgcgggtatggatacgttcataaagctgaccacaaagaataaacagacccgccgcgctcaaaccgtgcgcaatcatctggattaccgcgccctggtaggccaactggctgccggtgtagatagcaatcagcacgaagcccatgtgggaaacgctggtgtaggcgatcagacgtttgatatcggtctgggcgaaggccatccacgcaccgtagaagatgccgataacacccagccacatagcaattggcgcgaactctgcgctcgcgttcgggaacagcggcagggagaaacgcagcaaaccgtaagcggcagttttcagcaagatccccgcgaggtcaacggaaccggcggtcggagcctgggagtgcgcatccggcagccagccatgcagcggaaccaccggcattttgactgcgaaggcgatgaagaagcccagcattaacaggtattccacaccactggacattggcgtattcagcagctcttcatagttgaaggtccagacgccggtcgcattgtagtgaacaaaaaccagcgccaggatggcaatcaacatcaccaggccactcgcctgggtgtaaatgaagaacttggttgccgccgtgatacgcgttttaccgtcagaggctttatgcccccacagtgcgatcaggaagtacatcggcaccagcatcatttcccagaagaagaagaacaggaacatgtcgatggcaaggaacacgccgataacgccgcccaggatccacatcaggttgaggtggaagaagccctgatatttttcgatctctttccagctacatagtaccgccagcacaccgagcagaccggtcagcacgaccatcagcaggctcagcccgtcaatggcgagatgaatagagataccaaaacgcgggatccacggcatgtcgaattcagactgccactgcggaattccggcggattgcgtcagactataaccgccctgcaaccacagttgcaggctcagcgccagcgtcaatcccatggtgatcagcgcgatccagcgtggcaccttgacgccaaagcgttcggtctgccagcacaggaagccgccaataaagggaattaatattagccagggtagtaacatggcgatctttattccttgtaaaagtcccgtcaggaccggattttcaacgaattctcacgacagaaaattctcttcggactgggggtagtgtcggatgcaccgcgaaggcggcttatccgacctacgttcttatatgcccaggggcaatcccacaatccttaactcaacgcagtaccatcaacagtgccagcaccacgaccgcaccgatgctcatggatgccacataccagcgcagatagccgttctcacttaacagcagacctttacctgcaaagcgggaaaggacagccgggatgttcatcatactgttcagcggatcgcgtttcagcaaccaggcaatacccaggaacggcttgacgaacactttgtcatacagccagtcaaatccccaggcgttgtaccaccaggtgcccagcagacggcccggcgcactgttggcgatggaggtcaccagagtacgtttacccagccacagccaggctgccagcagaatgccgaccaccgcgaccacgccagaggtaatttccagggtcaacatgctgccgtgcgccagttccgtcgtttgcggaagcacgccctgcagcggcggtacaatcagtgcgccaacgaaggtggaaaggatcagcagcacaatcagcggcaggctgtgagttacccctttcacggcgtgagcgtgaatttgttcttttccgtggaagacgatgaaaatcatacggaaggtgtagaggctggtcataaacgcaccgaccagacctgccaccatcagattgatatgaccattcgccatcgcacccgcgaggatctcatccttactgaagaagcccgcagtgaccagcggtagtgcgctcagtgctgcgccgcccaccaggaagcagagataaaccagcggaatagatttacgcagaccgcccatcttgaagatgttctgttcgtgatggcaggccagaatgacggaaccggatgccaggaacagcagcgctttaaagaacgcgtgggtcatcaagtggaaaatcgccgcatcccatgcctgcacgccaagcgcgaggaacatgtagccaatctggctcatggtagagtaagcgagaacacgtttgatgtcggtctgtaccagcgcggcaaaaccggccagcagcagcgtaaccgccccgacaatacccaccagatgcagaacttccggcgtcatcaggaacaggccgtgggtacgggcgatcaggtagacacccgcggttaccatggttgcggcgtggatcagcgcggagacaggcgtcgggcccgccatcgcgtcggcaagccatgtctgcaacggcaactgcgcagatttaccgaccgcaccgcccagcagcatcagcgtcgcccacatcagcatgttattgccgtcagcaaagtgcgctggtgccagttccaccatttcgcggaagttcagggtgcccagttcgttgtaaagaatgaacagtgcgaaagcgaggaacacgtcacccacacgggtcacgacgaacgctttcattgccgctgcgccattcttcggatcggtgtaatagaacccgatcagcagataggagcacaggcccacgccttcccagccgaggtacatcagcagcaggttgtcggcaagcaccagaaccaccatgctggcgatgaacaggttggtgtaagcgaagaagcgagagtagccctcttcaccgcgcatataccaggaggcgtacatgtgaataaggaaacccacaccagtgaccacgctgagcatggtcaggctcaggccgtccagcaccaggttaaaaccgatgttaaagtcgcctacgctcatccacgtccacagcggctggctgtatgtctgctcgccgttagcgaagaaatcaacgccgataaaggcggttaccagcgccgccaggcccacagagcctacgccgacgatcgcgctgacgttttcagaccagcgcccacgggagaatgccagcaggacgaagccaatcaatggcaaaataatggttaaggcaagcatgttcatccgcgcatctcacttacactatcgatgttcaggttctggcgacgacggtgaagttgcagcagcagcgcaaggccgatactcgcttctgccgccgcgaggctgatggcgagaatgtacatcacctgaccgtcggtctggccccagtagcttccggcgaccacgaaggccagcgcggaggcgttaatcatgatttccagaccaatcaacataaacagcagattgcgacggataaccagaccggttaagccaagaacgaataagattgccgcgaggatcagtccatgttgtaaggggatcatgcgtgctcctccgtttttcttttcgcgctgtcgtctttacgattgctcagcacttcacccgcacgctcttcacgaccgacgtggaaggccacaaccagacctgcgagcagtagcatagaagccagttccaccgccagtacgtaaggcccgaacagcgtaatacccactgctttagcactgattggcgtaccgtcgataccctgatcgttaacaccgaggatggcgtaaacaatcaccaccagcatgatggcgctcaaaattgccggaccaatccacacctgcggtttcagccactggcgttcctgttcgatttcactaccgcccaggttgagcatcatcaccacgaacacgaacagcaccataatggcacccgcgtagacgataatttccagcgcaccggcgaagtaagcgcccagactgaagaacaccccggaaatcgccagcaggctaataatcaggtacagcagtgcgtgtaccggattggtatgggtgatcactcgcaaggtcgcaagtatggctatcaggccacagatataaaaagcgaactccattgcccctctccttacggtaacaggctcttgacgtcgataggcttggcttcgttctctgcttcgcccttatctttgccgtcgattgccatacctgccatccggtagaagttatattccgggtatttgcccggaccggagatcagcagatcctctttctcgtaaaccagatcctggcgcttgtattcccccatttcgaaatccggggttaactgaatcgccgtggtcggacaggcttcttcgcacagaccacagaaaatgcagcgactgaagttgatgcggaaaaattccgggtaccagcgaccgtctttggtttctgctttttgcaggctgatacagccgaccgggcaggctaccgcgcagaggttacaggctacgcaacgctcttcgccgtccgggtcgcgggtcagaacgatacgaccacgataacggggcggcagatagaccggctcttccgggtacattcgcgtttcgcgtttggcgaacgcgtgcaggccgatcatccagatactacgaacctgggtgccgaaacctactaacaattcttttaaggtcatggtcttattgccccttattgcgcctgccagagaatgacagccgccgttaccagcaagttgatcagcgtcagcggcaggcagattttccagccgaaggacattacctggtcataacgcggacgcggtaagctcgcacgaatcaaaatgaacatcatcataaagaacgcggttttcagcgcgaaccagatgaatggcggtaacaacgggccttgccagccaccgaagaacagcgtcaccatcaatgcagagatggtcacaatcccgatgtactcacccacgaagaacagaccgaacttcataccggaatattcaatgtggtaaccatccgccagttcctgctcggcttccggctggtcaaacgggtgacggtgacataccgccacgcccgcgatggcaaaggtaataaaaccaaagaattgcgggataacgttccacacatgcgcctggctgttgacgatgtcggtcatgttgaaactaccggcctgcgccaccacgcccatcaaggaaagcccgaggaacacttcgtagctcagggtctgcgcagaagcacgcatcgcacccagcaagctgtatttgttgttactactccagcccgcaaacagcaccgcgtaaaccgccagacctgccatcatcaggaagaacaaaatcccgatgttcaggtcggcaaccacccaacccggactgactggcacaatcgcaaaggccagcagcaggctggtaaaggcaatcatcggtgccagggtaaagatgacgcgatcgctgaatttcgggatccagtcttctttaaagaacattttgatcatgtccgcaaccagctggaggctaccgccccagccaacacggttaggtccgtaacggttctggaacagacccagcaggcgacgttcgccaaagctcatgaatgccccgcaggtgacaaccaccagcaggatcaccaccgctttgaggatggtcagcaggatctcaatcagttccggacttatccaactcattgttgtgcctccttgagatcctcaagatgcgcgccagccagcaccggagcaatgccggacatacccatcggcaagcccacctgccctgccgtcagtccttcggcgatttcaaccggcagcgtgaccgtgttgccatcgtaactaaaggagacgcgtgtacctgcgttcacacccaacttcgcggcatccgctgggttgagtttgatgtacggctgcggcatacggctctggaagaccggagcacgctgactcaattcatcgctgccaaacaggtggtaatacggcgcgatacgccatttcccgtcctgcggctggaagcgtgccggtacgctggtgaagtaatccagaccattttcgctggtttcaaacagacgcacgcccggatcgccaaagcgcagtttgccgcccacttcgtcctggaatttgttccacgcctgcggggagttccagcccggcgcccaggcaaacggcacttggctacggtgcgcagtcggctggttgttaccttccatgctgaaggtgaacatggtgtcaatatcctgcggctgacgcggctcatgaacgctgatattggcgcgcatggcggtacgaccgctgtaacggtgcggttcacgggccagtttctgcccacgaatacggaatgtcgcatccggcgcagcatctttgatacctgccagttccgggattttcgccacaacagcgtcaatcacatggtcgagctgcgtccagtccacttcacggctcagcagggtgctgtgcaggctgtgtaaccagcgccagctttccagcatgacagttttgctgtcgtaataagcaggatcgtaaacctggaagaaacgttgggcgcggccttcgttgttgatcaccgtaccgtcgctttcagcaaagctggcagcagaaagtaccagatgggcgttttccataatcgctgtgcgttgatgatcaaccaccatcaccagcggtgctttagccagcgcagcattcacgcggatagcagaagcgtgacgatgcagatcgttttccaacaccaccaccgcgtcggcgcgtccggtttccagttcggttaacgcttcttcaaggctaccgccacccataatgcccagccccatgctgttgacggaacgggcaatcatggtgataccgacgtcagcgccgcgacctttcagggctttcgcgacgttagccgccgcctgaatcacctctaagctaccggcgttcgtcccggagataatcaacggtttcttcgcacctgccagtgcctgcacgatgacgtcgattttgctttgcagctcaggttcgataccgtcaaccgctggtgcagagttatccagcgcatgggcgatggcaaaacctaaacgcgcctgatcttcaaccggtgcgcggtaagtccacgccgcgatatcatccagacgggtgtcatcaacgttggtaacaaacagcggatgcttcgcacgttgaccgatgttgaggattgccgcaatctgccagtcagccactttctgtgctgccgccatttcgcgcgctttacctttcacagcctgacgcactgccagcgcgacgcgcgcgccggtctgggtaacgtcttcgcccagcaccagtaccgcatcgtaagattcgatttcgcgcagagccggagtataaatgccgccttcacgcagcactttcagcgccagttgcagacgttcctgctcaccgtgagcgataccggtgtagaagttttcttcgcccaccagttcacgcagcgcaaagttgctttccacgctggcacgcggagaaccaataccgatcactttcttgctctgacgcagaatatctgccgcgccctgcattgcctgttcggcgttgagggtaatgaaatcatcgccacgacgctgtactggctgacgcggacgatccttcaggttgacgtaaccgtaaccgaaacgaccacggtcgcagaggaagtagtggtttaccgtaccgttgtaacggttttcgatacgacgcagttcgccgtaacgttcaccggggctgatgttacagccgatggaacattgctggcagatgctcggcgcaaactgcatatcccatttacggttgtaacgctcggagtgcgttttgtcggtaaatacgccggtcgggcaaatttcgaccaggttaccggaaaattcgctttccagcgtgccgtcttccgggcgaccgaagtagacgttgtcgtgcgcaccgtaaacgcccagatctgtaccgtcagcgtaatctttgtagtaacgcacacagcggtagcaggcgatgcagcggttcatttcgtgagagatgaatggccccaaatcctgattacggtgggtacgtttggtgaaacggtagcgacggaagctgtgtccggtcatcacaatcatatcctgaagatggcagttaccgccctcttcacataccggacagtcgtgcgggtggttggtcatcaaccactcgaccacgctttcacggaactgtttcgcttcttcgtcgtcaatggaaataaaggtgccatcggaagccggtgtcatacaagacatcaccaggcgaccacgcgtgtcttccgcgttttggtattgcttcaccgcacactggcggcaagcaccgacacttcccagcgccggatgccagcaaaagtaaggaatatcaaggcccagagacagacaagcttccagcaggttgtccgctccgttgacctcgtattctttgccgtctacatgaattgtagccattagcatgcttccagttttctcagtcagagactgagcgttaatcgaaattcggttaccagcgctctttcagcaggttcggctgaatcccattaatcaaatgggtattgctgaacggctgtttgattcccgcctcaaattcttcgcggaaatatttgatggcgctctgtaacggctccactgcaccaggtgcgtgggcacagaaagttttacccgggcctaagaatcgacacagttgctcaagtgtttcgatatcgcccggctgaccttcaccacgctccagcgcacgcagaattttcacgctccacggcagaccgtcgcggcacggcgtacaccagccgcaggactcacgggcgaaaaactcttccaggttacgcaccaggctcaccatgttgatctcatggtcaaccgccatcgccagcgccgtacccagacggctgcccgctttaccgatactttcgaattccatcggcagatcaaggtgcgcttcggtcaggaagtcagtccccgcgccgcctggctgccaggctttaaatttcagaccatcacgcataccaccggcgtaatcttcgaggatctcgcgtgcggtggtgccgaacggcagttcccacagtcccggatttttcacccgaccggagaagcccatcagcttggtgccagcatctttacttttgctgatgttctgataccactccacgccgttagcgaggatcgccggaacgttacacagggtttcgacgttgttgacacaggtcggtttaccccatgcgccggaggttgccgggaagggtggcttgctgcgtgggttagcacgacgtccttccagggagttgattaacgctgtttcttccccgcagatgtagcgccctgccccggtatggacgaacagttcgaaatcgaaacctgttcccataatgtttttgccaagcagacccgcttcggtggcttcggcaatggcacggcgcagattaactgccgcttcgatatattcgccacgcaggaagatgtagccacggtaagctttcagcgcaaacgcggagatgagcataccttccaccagcaggtgcggcagttgctccatcaacaggcggtctttataggtgcccggctccatttcatcggcattacacagcaggtaacggatgttcatggattcgtctttcggcatcaggctccatttcaggccagtgctgaagcccgcgccgccgcgccctttcagaccagcgtcttttacctgattaacgatttcgtccggagacagcccggtcagcgccttacgcgcgccttcgtaaccgtttttgctgcggtattcgtccagccacactggctgtttgtcatcgcgcagacgccaggtcagcggatgcgtttcgggagtacggataatgtttttcatttataccgctccagcagttcagggatcgcttccggggtcagatgcgcgtgagtgtcctcatcgatcatcatgtttggccctttatcacagttccccaggcagcaagttggcagcagcgtaaagcggccatcaaatgtcgtttgccctggtttgatgttcagctttttctcgagcgccgcctgaataccctgataaccgttgatatgacagaccacgctgtcacaataacggatcacatggcgaccaaccggctggcggaagatctgactgtagaacgttgccacaccttcgacgtcgcttgccggaatacccagcacatcggcgatcgtgtggatcgcaccatccggcacccagccacgctgcttctgaacgattttcagcgcttcaatggacgccgcacgcgggtcttcgtagtggtgcatctcgtgctcgatcgcttcacgctctgccgcactcagctcaaaagcctcggtttgtggttgttgattctcgtgcataattagcggtccacatcactcataacaaaatcgatactgcccagataaacaatcaggtcagacaccaggctgccgcggatcgccgccggaatttgctgcaaatgcgcaaagctcggggtacgaacacgggtgcggtaactcatggtgctgccgtcgctggtcaggtagtaactgttgatccctttggtcgcctcaatcatctggaaagattcattggcaggcatcaccggaccccagctcacttgcaggaagtgggtgatcagggtttcgatatgttgcagcgtgcgctctttcggcggcggcgtggtcagcgggtgatccgctttgaacgggccttccggcatgttgttgaggcactgctcaagaatgcgcagactctggcgcagctcttccactttaagcattacgcgggtgtagcagtcagaaacgccaccacccaccgggatttcaaagtcgaagttttcatagccagaataaggacgcgccttacgcacgtcgaagtcgatcccggtagcacgcaggcccgcgccagtggtgccccactccagcgcctctttcgcgccataggcggcaacgccctgggaacgacctttcagaatggtgttttgcagcgccgctttctcgtaagacgccagacgtttcggcatccagtcgaggaactcacgcagcaggcgatcccagccgcgcggcaggtcgtgcgctacgccgccaatacggaaccacgccgggtgcatacggaaaccagtgattgcttccaccagatcgtaaattttctgacgatcggtaaaggcgaagaacactggcgtcattgcgccgacgtcctgaataaaggtgctgatatacagcaggtgactgttgatgcggaacagttcggagagcataacgcgaatgacgttaacgcgatccggcacggtgatcccggccagtttctctaccgccagcacgtaaggcatttcgttaacgcagccgccgaggtattcgatacggtcagtatacggaatgtagctgtgccaggactggcgttcgcccattttctccgcaccacggtggtggtaaccgatgtctggtacgcagtcgacaatctcttcgccatcgagttgcaaaacgatacggaaagccccgtgcgcgctcgggtggttcggaccgaggttgaggaacatgaagtcctcgttttcggtgccgcgcttcatcccccactcttccggtttgaaggtcagggcttccatctccagatcctgtttggctttggtcagctcaaacgggctgaattcggtagcgcgcgccggataatctttacgcagcgggtgacctttccaggtttgcggcatcatgatgcgtcgcaggttcgggtgaccgtcgaaagtaatgccaaacagatcccaggtttcacgctcataccagttagcgttcgggaacagtttggtgaaggtcggtacgtgcaggtcgttttctgccagcgccaccttcagcatgatgtcgcggttacgatcgatagaaatcagatggtagaaaacggaaaaatccgcggcaggtaacccttcgcggtgtgtgcgcagacgttcgtccatgccgtgtaagtcaaacagcatgacgtaaggtttcggcagtttctttaagaaatcgccaacttccagtaattgttcacgcttgatccacacaacgggaaccccggtgcgagtcgcctgaacagtaaaggcatccggcccaaaacggttgcgcagttcgccaatcaccggatcatcaagatgatcgcgggtctgccaggcgggttcttgcgcggttaagtcggtcatattgttcaccattgcaaatggtccgtggtgactgtcggcgcagtaagcttcgcgaaatagatttaggaataagcgaagaaaaatccctttgccgacaggcgcaaattaaatctcgtcaggtgtacgcaggttagttacggcaatgcgttcaccgcgcttgcgttcgcgctcactttgcatattggcgcgataaacgccctgatcgccaaccacccaggagagcggacgacgttctttgccgatagattcctgcaacagcatcagtgcctgcatgtacgcttcaggacgcggcgggcagcccgggatatacacatcaaccgggatgaatttatcgacgccctgcacaacggaataaatatcgtacataccaccagagttggcacaggcacccatactgataacccattttggttccagcatctggtcatacagacgctgaataaccggtgccattttggtaaagcaggttcctgcaaccaccatcaggtcagcctgacgcgggctagcacgcaatacttctgcgccaaaacgcgccacgtcatgcaccgcggtaaagctagtcaccatctcaacgtaacagcaggaaagaccgaagttatacggccaaatactgtttttacgaccccagttaaccatgtcattgagcttgcccataaacacgtttttgttaacttcttgctccagagggtcggttacgatctcctgcttttgcagggggtaacggtcgttctcaccgttgggatctatgcgggtgagcgtataatccatcttaatgcctcgcggttagcgttgacgattagcgatactgttcgtttccgggttcatacgctcgcggcgactacgcgcgggcgtccagtccagcgcgccaatacgcaccagataaaccagacctgccagtaacacaaaaataaaaattgcagcttccacaaagcctacccagccgctttcgcggatagaggtactccatgcgaacagatacagcgcttcaacgtcgaagataacgaagaacatggccaccagataaaacttggcggacaggcgtaagcgggcggagccgacgctgtcgataccggattcaaacggcacgtttttgctcctcgcgcgtgcgcgaccgcctaaaaaccaaccgcctaccagcatcaggcaacacaggccaatggcaacgataagaaagatagcgaatgcccagtgatgagcgatgacttcagtggatgtactcatactcattgcttactcatcaaaagtagcgccagattcactgctcttcacggcagatggacgccacatcgattcatggggaggaataaaaaaaaccttacaatcactgtagaaattcttttatacagctaattgatgtggttttttactcctttctataaccttttgtcaactttaacaaaagtttcttcacattagtttacataatatcaacaccattagcatttaatgccctttcaccccagatccttgacgactccaggataattagatgttgttgaatcgtgtccgttgtgaagcaatggaaaaaatacgggtctattttgacaggaatttgtgtcgattcctccccccaaaagagagtattttcttgatctgtgacacgcttttgtcattccataacaaaaacgcagcaacaaatttacgtattttttaacatcattgtagcaggtgatttttttcaggcgattatttgtgcgttcgggacgtgaatctctggtggttgaaaaatgaacagttttgtacgttctgcactatgcgatgaaggatttttactaaaaaaaagccgctggggtttaaaacacccccagcggctcgttttttacactattgtctcaggaattatctatcgtccgtcgattactcgatatccctttcaatcaacaaactatcatccccttccggagcagacattgggctgtattgccacggattatggtagctctccatcgcctgatagatcacctgggccagctcattattactggacggatcatagcacagcaaatattcggtatcaggtagcggcggtaagccatctactccactcagcacacgcaggtccgggctcatcatctcaaccggccttgccgtcacgccaagaccggctttcactgccgcacgaacggccggaagcgtgctggcgacataagccagtcgccatggaatatctgctttattaagcgtcgccagcaccatatcgcgaaacgggctaggatcatccagcaatacaagagggatcggctcgcctttttgcaatatgtattccgctgcgcagtaccagtgtgttgggctggtacgcaggttcaatgccttaaacgcactaggacgatgggtggttaccatcaaatccacttcctgggattccagcatttctgccatataggcattacgtttaacgcggacatccagcgctaatttcggataaacgctactcacgcgatttaacaggaaaggtaagatcgtatcggcagattcatcactagcaccgatagttaatacgccctgaagattactgaacattaaactactgcaggcctcatcattaaaacgcaggattttcctggcgtaaccaagaagttgaatgccatgttcagttaacagtttgttgcgaccgtgacgagcgaacagttctttcccaacgagttgttccagacgctgcatttgctgacttacggcggactgagtacgacacacagcggcagctgcggcagcaaaagtgttcagatcggcaacagcaacaaatgttctcagcagatcgaggtcgaggttaattatcggacgatttgcacttatcatatattatcacttactggcggctcatactgagctggttaatgctgtgcacacacaaacaagcaattccatttgtaatgtgcctccctggcagtttcatccggaacccggacgaaagtaaaaatgcatatgagttgcactaaaaaagcgactcacattgttccgttataatgcctgaagtagatcacagaatatatcttcagggatcgcatatctattaagttactcactcttttctatttatgacatgcgcgtgtttgtataaatgtaaatgtgagtccttgttccactctcgtgcagcatcgctggtcatacgcgaacacgtaccaacagcaatggtgaggcggcatcaagagcagggatccgtcatttatccgagcattttaccccaaaaaccttttatttataagggtcattgcgaattatctgatgcaaagttatgttatgttaggcaaagtaatcttctattattaataagcacatcaaaacctttttgaatattaaataataattaattagcatcatcctcattcattaattccgcttaacaatagtttcacaccttgcccccattgcgacacctcggaaatcatcacgcagttaaactctccgtaatgaggaaatatcatcatcgcgtttcattagtgaattcttaaatgaggcattttcacacaattatcttacagataaaaaaaccagacttacaattaagaatcagaacaattcactatataacattgcatgtaaagcatatacacctcattattttgtcattattaagttattaacagcacaatcgagccttcccctctggcaaaatcttattctgcagaccttcaaaacaccgtcctgggggagtacattgttctaagctgacttccacggcagggagtggcgataacagcaaaaaaggtcaagattcatgtcccccattgaaaaatccagcaaattagagaatgtctgttatgacatccgtggtccggtgctgaaagaagcaaaacgcctggaagaagaaggtaacaaggtactgaaactgaacatcggcaacccagccccgttcggttttgacgcgccagatgaaatcctcgttgacgtgatacgcaacctgcctaccgctcaagggtattgcgattccaaaggtctttactccgcgcgtaaagccatcatgcagcactaccaggctcgtggcatgcgtgatgttaccgtggaagatatttacatcggcaatggtgtaagcgagcttatcgttcaggcaatgcaggcattgctgaacagcggggacgaaatgttggttcctgcaccagattacccactctggaccgcggcggttagcctttccagcggtaaagcggtgcattatctttgcgatgaatcctctgactggttcccggacctcgatgatattcgcgctaaaattacgcctcgtacgcgtgggatcgttattatcaacccaaataacccaaccggcgcggtatattccaaagagcttttaatggagattgtggagattgcacgtcagcataatctcattatcttcgccgatgaaatttatgacaaaattctctacgacgacgctgagcatcacagtattgcgccgctggcacctgacctgctgaccattacctttaacggactgagcaaaacgtaccgcgttgcaggcttccgtcaggggtggatggtgttgaacgggccgaaaaaacacgccaaaggctacatcgaaggtctggaaatgctggctagtatgcgcctgtgtgctaacgttcctgcgcaacacgccattcagaccgcgctaggtggttatcagagcatcagtgaatttattacccctggcggtcgtctttatgagcagcgtaaccgcgcgtgggaactgatcaacgatattccgggcgtttcctgcgtgaaacctcgtggtgcgctgtatatgttcccgaaaatcgacgccaaacgctttaacattcacgacgatcagaaaatggtgttggatttcctgttgcaggaaaaagttctgttggtgcaagggacggcattcaactggccgtggccggatcacttccgcattgtcacgctaccgcgtgtcgatgatatcgagctgtctttgagcaagttcgcgcgtttcctttctggttatcatcagctgtaatcttaatttcactgccggagattgcatccggcagcgttatcccgccacaatgacctgatgatgtcatcatacgtaaggtcactatgaaacagagccatttttttgcccatctctcccgcctgaaactcattaaccgctggccgctcatgcgcaacgtgcggacggaaaatgtgtccgaacacagtttgcaggtagcgatggtcgcccatgcgctggcagctatcaaaaatcgaaaatttggcggtaatgtcaacgccgaacgtatcgctttactggcgatgtaccacgatgccagtgaagtgctcaccggcgatctccctactccggtgaaatacttcaatagccaaatcgctcaggagtacaaggctattgaaaaaatcgctcagcaaaaactggtcgatatggttccggaagagctgcgggatatctttgcgccgttaattgacgagcatgcatatagcgatgaagaaaaaagcctggtgaaacaggcagatgcactgtgtgcatatctgaaatgtctggaagaactcgcggccggaaataatgaattcttgctggcaaaaacgcgactggaagcgacgcttgaagcgcgtcgcagccaggagatggactacttcatggaaatatttgttcccagcttccatcttagcctcgatgagattagccaggatagtccgctgtaagcagccggagtctgcgtcgcatcaggcaataagcgccggatgcgacatcaggctcttgtcaaaacggaaacagcatcgggatcatcaccacacaaaccgccatcacgataatggtgaacggtacccccaacttcacaaagtcactgaagctgtaatttcccggacctaaaaccagtgtgttaacaggactagaaaccggtgtcataaaggcggcggatgctgccatcgccacgaccatcgcgaatggataagggctcacccccatcgttttggcagcagccagcgcaatcggagccatcaacaccgccgtcgcggtattagagataaatagcccaataaccgcgctcaagacaaacaaacaccccagcatcatatgtggcccgtaaccaccgccaatgtccatcagccctttcaccgccagcgcgacacctcccgttttctgtaatgccacagcaaacggcatcatcccaacgatcaaaataatgctcggccagtgaatggatttataggcgctttcagcatctatacagcggaatttccccatcagcaggcaggcgatgatagcggcaacaggattaggaatttcatctgtcagcattaacgccaccattagcaccagacagaaaatggcatggggtgcctggctgtgcgcgggacttgcttcactcacctcttccggtaagttcagcgctacgaagtcgcggccctgtttggccagcataccgatcagtttccagttacccacaaccaggatgatatcgcccagcagcagaggctcatccgccaggctaccttccagcgccacgccattgcgctttagccccaccacattcagtccgtagcgggtacgaaaaccaatttcgcgcacgcttttaccaatcagttcactctcaggaattaaactaatctctgccatgcccacatcaagggcctggtcagaaaatactcgccgcgcagtaccatcggctccagcaattgctcactacaaaattgccggagatcgacatcagccgcagacatatcaataagcaaaacgtcacgcgcgcgaaattcagaaaccccattaacgttcacgataacgcgacgaaaacgccgccagcgttcaacaccgatgacgttagcgccataacgctcacgtaatttgagatcatccagccgttgaccaatcattgggcttccggggcgaatagccagacgtcgcgcacgcccggtcagtcgatattcacggataagatcgcgaaaggttcgacgcgtccagccttcgcgctgcggggtctgggtatcccctttcagcatgaaacgcatcactaacatatacaaaatacccagcaccagcacgaccaggccaataggtgttacgctaaagaaactgaagccgtgatagccttcacgcagcaattcactgttgactaccaggttcggcggcgtcgccaccagcgtcatcatgccgctaatcagcccggcaaaacttaacggcatcatcagacgactcgggctcgtttgcatacgcatggcaacgcttaacaccacgggaataaagatagcgacaacgccggtactactcataaacgcgccaagccccgcgacggtcagcatcaacaaaaccaacattttgatttcactattgcccgcaactttgaccagccatgttcccattacggtggcaacaccggtacggaccaaaccatcgccaataataaacaaggcggcaatcaggacaacgttaggatcagaaaagccggaaaatacttctgggactgtcagcgttccgcttaatgcaaacgcgacaataacaaacaaagcgaccgcatccatacgcactctgcccgtcgcaaacaagacgatggcaacggccagtaaactaagaacccaaatcaattcaccgttcacaacttatccttgttaattgagggggatgacttgattctgccataaaaaagccccgacgagacggggctaaatcatgatcaggtgtttcactgaataataacatcgccatttggctgtttggtcacagtaatttgctccagactgtggaggaccaaatcgacctcattcaggcgcggggtatctgccggagcgttaaccgcaatgacatgacaacccgccgccaggccagaaagcacgccagcgggagcatcttccaccaccacacactcctgcggcgcaagccccagcagctgcgcgcctaacagatacgcatcaggttctggttttccgcgcttcactcgctcagcggttacaaacacctctggtgcgggaagcccagctattttatggcgcgctcgcgctaccggcatggagccagaagtcacaatggcccacggaatacctgctttattcaaatgactgagtaaggcgattgcccccggaagcgcggtaataccttcggtttccgtggcctcgatgtgctccagacgcgtaaactcggcggcaatatcagcctcggatttgcccgccataaaatggcgcagagaggtgatcgcctgtttaccgtgaatgaaagccagcacctcttccggcgctaacccatgacgtctggcccagttgctccacgcccgttctaccgcaggcagggaatccaccagcgttccatcaagatcaaacagaaaacctttgcaccgcacgcgggcctcctcaggcattgataatttgattaatttcgttggcgctcaaatggtactgacgcgggcaggcatgccacacattaagcatgcgctgatatttttcccacattggcgtctgggcgttaaaaccgtgagttccggcgtcaaaatgggtatagcgcccttccacattaaccataaagcggacataaccgaggtaacgtgcttcagtggcggcgtcaaagccgaggaaggtgacacgacgttcatcgatggattgctggtcctgcaaattagaccaggaaacatgcaacgcatgatacatctccataatgtcgatgatagtgcggcaggtttcttctttcagctcgccaaactcgcgatccaattcacgcatctgtaatccgtaaccacgctcaataattgtttgcaggcgacggtaacgttcagcatttgccggatcgagcatagtcatcatcttgtactgattagacaaaataagacgttgcgcgttggtcatttccattgttgactcctgtatcactctactacggtgaaaaaaaagaaggctgagtatgccttcttttatatgcgtaatcaggggtcaattacaaatcatcaaggaaagttttatccagttgtttgaaggcgcgcttaagcgtgtcagctaatgcctggtaatcaggcttgccttcaacgggtgccaacacctgtccagactcctgcaatttaccgcgaacttcataaaaccagttaaggattgcagggggtaatggcgtgacagaacgcttgcccagccaccacaatccctgcatgggtaaacttaaggcgaacagggcagtggcaactgccggcccaagctgaccgcccagggcaatctgccagcagagagtaaatacggcgatcggcggcataaaacggatcgcataacgcgtcatcttgataacgcgattttcgacaaagaccggggcaaggcgtttttccagcggccacgtcttactgtaatgctgtccccggcgaaacaagctaaaaaaattaacagaacgattatccggcgtactcatgcttcacctcaacttcacatataaagattcaaaaatttgtgcaaattcacaactcagcgggacaacgttcaaaacattttgtcttccatacccactatcaggtatcctttagcagcctgaaggcctaagtagtacatattcattgagtcgtcaaattcatatacattatgccattggctgaaaattacgcaaaatggcatagactcaagatatttcttccatcatgcaaaaaaaatttgcagtgcatgatgttaatcataaatgtcggtgtcatcatgcgctacgctctatggctccctgacgtttttttagccacgtatcaattataggtacttccatgagcagtaagttagtactggttctgaactgcggtagttctagtctgaaatttgccatcatcgatgcagtaaatggtgaagagtacctttctggtttagccgaatgtttccacctgcccgaagcacgtatcaaatggaaaatggacggcaataaacaggaagcggctttaggtgcaggcgccgctcacagcgaagcgctcaactttatcgttaatactattctggcacaaaaaccagaactgtctgcgcagctgactgctatcggtcaccgtatcgtacacggcggcgaaaagtataccagctccgtagtgatcgatgagtctgttattcagggtatcaaagatgcagcttcttttgcaccgctgcacaacccggctcacctgatcggtatcgaagaagctctgaaatctttcccacagctgaaagacaaaaacgttgctgtatttgacaccgcgttccaccagactatgccggaagagtcttacctctacgccctgccttacaacctgtacaaagagcacggcatccgtcgttacggcgcgcacggcaccagccacttctatgtaacccaggaagcggcaaaaatgctgaacaaaccggtagaagaactgaacatcatcacctgccacctgggcaacggtggttccgtttctgctatccgcaacggtaaatgcgttgacacctctatgggcctgaccccgctggaaggtctggtcatgggtacccgttctggtgatatcgatccggcgatcatcttccacctgcacgacaccctgggcatgagcgttgacgcaatcaacaaactgctgaccaaagagtctggcctgctgggtctgaccgaagtgaccagcgactgccgctatgttgaagacaactacgcgacgaaagaagacgcgaagcgcgcaatggacgtttactgccaccgcctggcgaaatacatcggtgcctacactgcgctgatggatggtcgtctggacgctgttgtattcactggtggtatcggtgaaaatgccgcaatggttcgtgaactgtctctgggcaaactgggcgtgctgggctttgaagttgatcatgaacgcaacctggctgcacgtttcggcaaatctggtttcatcaacaaagaaggtacccgtcctgcggtggttatcccaaccaacgaagaactggttatcgcgcaagacgcgagccgcctgactgcctgatttcacaccgccagctcagctggcggtgctgttttgtaacccgccaaatcggcggtaacgaaagaggataaaccgtgtcccgtattattatgctgatccctaccggaaccagcgtcggtctgaccagcgtcagccttggcgtgatccgtgcaatggaacgcaaaggcgttcgtctgagcgttttcaaacctatcgctcagccgcgtaccggtggcgatgcgcccgatcagactacgactatcgtgcgtgcgaactcttccaccacgacggccgctgaaccgctgaaaatgagctacgttgaaggtctgctttccagcaatcagaaagatgtgctgatggaagagatcgtcgcaaactaccacgctaacaccaaagacgctgaagtcgttctggttgaaggtctggtcccgacacgtaagcaccagtttgcccagtctctgaactacgaaatcgctaaaacgctgaatgcggaaatcgtcttcgttatgtctcagggcactgacaccccggaacagctgaaagagcgtatcgaactgacccgcaacagcttcggcggtgccaaaaacaccaacatcaccggcgttatcgttaacaaactgaacgcaccggttgatgaacagggtcgtactcgcccggatctgtccgagattttcgacgactcttccaaagctaaagtaaacaatgttgatccggcgaagctgcaagaatccagcccgctgccggttctcggcgctgtgccgtggagctttgacctgatcgcgactcgtgcgatcgatatggctcgccacctgaatgcgaccatcatcaacgaaggcgacatcaatactcgccgcgttaaatccgtcgctttctgcgcacgcagcattccgcacatgctggagcacttccgtgccggttctctgctggtgacttccgcagaccgtcctgacgtgctggtggccgcttgcctggcagccatgaacggcgtagaaatcggtgccctgctgctgactggcggttacgaaatggacgcgcgcatttctaaactgtgcgaacgtgctttcgctaccggcctgccggtatttatggtgaacaccaacacctggcagacctctctgagcctgcagagcttcaacctggaagttccggttgacgatcacgaacgtatcgagaaagttcaggaatacgttgctaactacatcaacgctgactggatcgaatctctgactgccacttctgagcgcagccgtcgtctgtctccgcctgcgttccgttatcagctgactgaacttgcgcgcaaagcgggcaaacgtatcgtactgccggaaggtgacgaaccgcgtaccgttaaagcagccgctatctgtgctgaacgtggtatcgcaacttgcgtactgctgggtaatccggcagagatcaaccgtgttgcagcgtctcagggtgtagaactgggtgcagggattgaaatcgttgatccagaagtggttcgcgaaagctatgttggtcgtctggtcgaactgcgtaagaacaaaggcatgaccgaaaccgttgcccgcgaacagctggaagacaacgtggtgctcggtacgctgatgctggaacaggatgaagttgatggtctggtttccggtgctgttcacactaccgcaaacaccatccgtccgccgctgcagctgatcaaaactgcaccgggcagctccctggtatcttccgtgttcttcatgctgctgccggaacaggtttacgtttacggtgactgtgcgatcaacccggatccgaccgctgaacagctggcagaaatcgcgattcagtccgctgattccgctgcggccttcggtatcgaaccgcgcgttgctatgctctcctactccaccggtacttctggtgcaggtagcgacgtagaaaaagttcgcgaagcaactcgtctggcgcaggaaaaacgtcctgacctgatgatcgacggtccgctgcagtacgacgctgcggtaatggctgacgttgcgaaatccaaagcgccgaactctccggttgcaggtcgcgctaccgtgttcatcttcccggatctgaacaccggtaacaccacctacaaagcggtacagcgttctgccgacctgatctccatcgggccgatgctgcagggtatgcgcaagccggttaacgacctgtcccgtggcgcactggttgacgatatcgtctacaccatcgcgctgactgcgattcagtctgcacagcagcagtaatctcgtcatcatccgcagctttgcgctgcggatatctgaaccggaaataatcactatttccggttttttattctcttaatttgcattaatcctttctgattatcttgcttaactgcgctgcatcaatgaattgcgccatcccactttgcatacttaccactttgttttgtgcaagggaatatttgcgctatgtccgcaatcactgaatccaaaccaacaagaagatgggcaatgcccgatacgttggtgattatcttttttgttgctattttaaccagccttgccacctgggtagttccggtggggatgtttgacagtcaggaagtgcagtatcaggttgatggtcaaacaaaaacacgcaaagtcgtagatccacacagttttcgcattctgactaacgaagcaggcgaacctgagtatcaccgcgtacagctgttcacgacgggcgatgaacgcccgggcctgatgaacttcccgtttgaaggattaaccagtggaagcaaatacgggacagccgttggcatcatcatgtttatgctggtgattggcggcgcgtttggcattgtgatgcgtacaggaaccattgataacggtatcctggcgcttattcgccatacccgcgggaatgaaattctctttattcctgcgctgtttattctgtttagtcttggcggcgcggtatttggtatgggagaagaggccgtcgcctttgccattatcatcgcaccgctaatggtccggctgggctatgacagtattaccaccgtcctggtgacctatattgccacgcaaatcggttttgccagtagctggatgaacccgttttgtgtggtcgttgctcaggggattgccggcgttccggtgctttctggctccgggttgcgtatcgtggtgtgggttatcgccactctgattggcctgatctttaccatggtgtacgccagtcgagtgaaaaagaatcctcttctgagtcgcgtgcatgagtccgaccgcttctttcgtgaaaagcaggctgatgttgaacaacgtccgtttacctttggtgactggctggtattgattgtcctgacc
